United States Patent Application Publication US 2015/0354009 A1 - sequence listing, part 16

SEQ ID NO: 391 - DNA, 80325 bp, Homo sapiens
atccgctcttcttttcctccgggaaaagaaacgggaagtggccgtgggccggtgaattccgtgtagtggccaaggtacgcaccgctccagaactatggggtgggcgtcctgggatttctgggcgcagggttgggtccgccgccccaggttttctgttgtccgccgccctgggtctctgggctgtgcaggaggcgccaaggctgggtttaggaaggccatgtttttggcgtcctagacaggaagagtctggaggaatcagctgagtctggggcctttcgtcccaggcaaggcggtcccaggccaggcgatcggggtccggtttgaaccccagctctgtgaccgcgagcagacttcccctcgctgagcatcagcttccccatctgtgcagtggggatgatgacgcctaccccattggagccaagactgccaggtagcctgattgacatccaggcagtcttgtggggtctcagggactaagggcttgcaggtgggtaccagttctccacatactgctccctccaaagcctgggaaaccttgcaccctcagccctctgggagactggggtcaggggtacagtgacactctttacctttaatgtctttattaatacagaaaacatacactaatttctcacaataccaaaataaattagaatttgggccgactgcttctaacactgttcattaaaatagtatttagttattccctgctcaaaatgattcatgatacaaattacttccaccatcactttatctttttttatgtttcacgggataatttgacccctaacaaaatccaatccttgcgttaaggatttttcttatctggctaggttataattagagtgggaaaatatatttacatttcatcaacagcttattttaaggtgattttatctgtttaattctcagctttgttccaaagagggggaggtggtgacagtctcttgcccactgaagcgtgccagacagagtgctaggcatgggggcagaggtgaatcagatgacagccacctctcaccacgaggagtggctgaaagtgtgactggactacaggcaatcctggccttggcaggtgagaccaagtgttgtattgagggagggtttccctagctcatcttctggtcacctccacagctgagctccactgtggcctggaggaaactgtgatccatgaaaggcatgtggggcctggtcccctcattttagctcagcttccaggacagagaggtccactccctgcagccttacagctattctgaagggttgggataaaaagaggagatggagactgggagcggcggctcacgcctttaatcccagcattttggaagtccgaggtgggtggatcacctggcatcaggagttccagaccagcctggccaacatggtgaaaccccacctctactaaaaatatgaaaaattagccaggcatggtggcaggcacctgttatcccagctgcttgggaagctgaagcaggagaatcgcttgaacctgggaggtggaggttgcaattagccgagaccatggcattgcactccaacctgggcaacaagggcaaaactccgtctcaaacaaacaaacaaacaacaacaaaaacaacaacaacacaaaaaaaccagaaaggaggagatgggagaatcaatgggaaagaccagaatacagagaatgttgccaaatgccaatttacaaccttaatttcctgaccagatttgaccctttggtgtctgtggctctcctgccactcacatacatgctggtggccttcctagaaaggaaataggagggcctccccatccctggtcctgagggatgtcattctaggcatgttttagactggacgcttaaggcttttccttcttgtgccctccacatggcttcaggaaagcttgtgctctctctgaaccctgcagcatgttttcagaggctgtcggttgccagattctgcagtgagctgtggatgggagggaattcaatagtgggtgggtgtgcagacagaaagggagcaggagtggggctctgccttccctgtcatgcaatcatatggtgacatgagtaaaacccagggagaaacagttttctctaaccaatgttctccttgaggttctctttctcttgtaagtgctaagtactgctccttttcctggagtccaattcctgaaagaggacaaatgggccaggagtggtggctcacgtctgtaatcctagcactttgtgaggctgaggcaggcagattacctgaggttaggagttcgagaccagcctgaccaacatggtgaaaccacgtctctactaaaaatacaaaaaattagctgggtgcagtgttgcgcgcctgtaatcccagctactcgggaggctgaggcaggagaatcgcttgaacctgggaagcggaggttgcagtgagccaagattgcatcactcactctagcctgggtgacagggtgagacttcgtctcaaagaaaaaaaaagagaaagaatacaaatggccaacaaatacataggaacatgatctacctcattcgcaaccagagaagccaattaagatggtgataataccataatgaacagtttgacaattttaaatgtgcataatccagcaattctgattctagaaatgtataaaatcattgaatcaatgtgtcaaggtaagtgtgttagggtatttttgaatcactgattctaacagatgtcccttagcatggggttgtttaataagttataaagcatgtataggctggaatgtcacatagattaaggagctggtcgcctcattgtttcctccctgtttcaccaaaacccatatggtcctggcctcatctcagcccctggcacccctgactctcatggccaaacgctggacatccttgctgtgggggctgagaacaacccagggacagtaccaagaatgtgagggagggtagggaggcactgaaccagcagctcctccaaaggagtgatgtgcttcctgaggtctattcacagaaggctactccagaacagccttctgtggatcctagctattctggtgtctgaagagggtatggtaaacctcactgggtctggctgaattcctgaattccaggcagtgaggtaaaaaaaaaaaaaattctgcccagcatctgggtcttgaggtggatgctgttgtttggggaacccagcacccattctccctctccctggcaataatgtcagtgttcctttgggcaagcactgtttcacacttccagcccctgaagttcaggtgaggctggctctactccttggttctagatgtagctacttccaagcaaatccccaagacttctgctagcattaccaagaagagttctcttcctccacttaagccctccaaggacgtgtgggcagggtggtggagacacaagccacaagagaaagtgcaggaatcctgtgttagcagtggctgagcttaggccaggccagagaaggagagggaggggattctgggccctggaaggagagtcatatagaggaggctgccctgttgaatggacggaggtgacaatttccaaggtttcctgaggcaaaaagaccaagataaggctggggctggggggagttctgtgcagcaggagccaggtggtaaagacagagtggaagagaaagccagtatggattttattctaaatggcctttgcataagagccaccatagaacagttttatttattgattttatttttattaatcctcctccaaacacagaacacataattttactgtttttttttgttggtggtggtggtggtaggtttgtttgtttgtttgtttgtttgtttgtttttagagacagggtcttactgtgtcactcaggcttcagtgcggttggcaggatcatagctcactgttacctctaactcctgaactcaagcgatcctctaggattggccactgcactcagcctagagttttaattgggataagtcagtagtctgatttgtgtttttggaagataactttggatccaggctggagaaatgtatcggacacggggacaaagtcagaagtagaaaaagcccttaggaagaggaggtggtattcttgaggaagggggtagtggagagggacaaagtgggagagtttaggtgctcagataaaaggcaaagcgctgggaagagtgcggtgaaactctggatagcttgggctactccacttctctgagcctcagtttcctcttccaaacagaaataatatccacttcatgaggttatgtttgacaagtgtagtagctgagagtattgtttttagtcaggtctggattggatctcaggtctggcaggtaacagctgtgtgaccttatgagagtcagttaatgatagattgtagcctttatggagcacttgttatgtttcaaccaacagaactctccccagactaggatacttattctagcttccaggagggtgagggggacggggggttgtggtgaggaagtattgtggagacagcaagccttttgtccaaagtcctactagtaaatgtggagccaggatttctctgtcacgttcccctaacttttctgcgcctaaaactgggataacaataatacacttccttgtgtggttgggcgtatacagaaaggggtctggcacatagcaggtgtttattaaattattattaaaattattattattacattctttgtgttttcctcaggttttgcatagagtgagcatcacttggacaaatcctttggattaaaaaaagatctactaagtgagggggaagaaactgcggctgccagagtctcagtgggggcttggggggcgtgaccagaggggcgtggtctacgggggcagggccacaactggagggccaggctgtgggggcggggccagcacacgaggactgagggtgggggcggggcccgggctggcaacgcatgcccagtgcggtccccttcgctgccgccgcggccgccgcggccaccgcccactcggggctggccagcggcgggcggccggggcgcagagaacggcctggctgggcgagcgcacggccatggccccgtggctgcagctctgctccgtcttctttacggtcaacgcctgcctcaacggctcgcagctggctgtggccgctggcgggtccggccgcgcgcggggcgccgacacctgtggctggagggtaaggcgagggcggcgggtttcttgccgtcgccaactcgcgggggacgcagcgcgcacaggtgctcgcggggaggcgagcccgcgccaacctgtctgctcttcgcggggtccgcggccggcctgggtctcactcctcccgcgcatcctcctggtttccctccccggacgcgtgtcctccggccctggccgagatgaaagcggctgcccgaccccggctttgtgttgctaatgaggtgcggccgccggccggggtcccattcagagggcgggcgtgaggggcggcggggctgggccgggcgccccaccctttgttcttggcccgggacctccttcgtcccagggctgcgtgtcccgggctgggatcccccgagccacccggaccgggttgcgctttggagagggaagggggtattctcccggactttcagtccacaaccctgctaaggcccgggcggccggagaggggacttggagcaccggggagggatgcgccccgctcttctagtagctttgttcctcctcgcctggggccgtcaccccactcctacccctcctctgactccgggacctcctgagaaacttcgcctcccggttcagcccttcgtcttgtgaaggtctcgcggctgatatcctccttccctgcttcgagttgcggatatttttccgccaaagggccgcgtgggtgtcatctgggtgaggtgcctgagacgagactggagaggtgcccagactttcgccgtgtgcattgagccgtcttcgtggaaccgagcgctcctttgacactgtctgggcgatgggcgcgggtgattgccattcccctctcagcttccctgctccctacctgggcttctggccttgggcggccccagaacctggagatgatgtccgtctgccccgagtctcccaccgaggcccgggtgggcccggcgtcagggcactcacggccttaagcttgtggagaaaacgtaggctttgcactcaggcagcagggacatgaccttggctctgctcctggggagccatgagcctcaatttcttcatatgaaaaatgggatgaaatgagaatttccttagtattgctgggctgagggataggtatggagtggtttgcttaggcgaacgttgactcagcctcttctgggtggctctaaacagcctcagcacagccaaaacctaggacataacactcccttaggcacgcaggctggtgcctccaagctcacttgccccacagtcccaagaaatgtggtgcagaaaaccaggtgtgagccagacagctgggatgtcttcagactcagtagctaagctatggagacggctatgacccctgctctgcctccgcccccgccacccccttccccccccgcccccccgccccattaggctctgtcattccttcctagttgagtaaagcatcacattttcttactgtgttccatttcagtaaaacattactgctcttgttttattgtttaaaaaaattttagtagctagcaagtttcctcaaggaggatctcgtgttgacttaaggatcctactagaattttggatttagactcctattggcttttgaatgactacaatatcacaggcgttttattttgagtgttcatgtgatggcgtaggtaaatcagtccgattcactgttttgctgcagttgccaaggtggcttcttatgccactgtacaaaactcgtgaagtttccatgctgtggggtatggtagtgccctgacggagccaggctggtgattttcttctacctgtgcgagtgtgttctcctctcccaaacctgcaccctcataaaatggtggctctgtcccagtcacctcacacttatgctgacgttttctccaccacagcccctagttgggggtgacttttctcagctgctcctgccttggccccaccaatcgtttccttgggtcatcctcattcgcctcctggacgatcgtagaggcctctgggccatgttccagattccaggctcatccaggctgatacatggttccttgtctcctggatttgctgcttggtggatttcatggacccagtttccccacatgctttgcattcccaccctttccagcctcaccccctacccttctcatcctgctcctaactccggatggatgccctctgtgcttccaagacatgcttttccctcctcccaggatgccttttcctcccttgagaattccttgcctatcttaagactcagttcaggtggtacctcctcagggaagccctcctgaatgccatgccccttgctttaccttctcatgcaggtccttgcactttagtctcatcagacagctttgtcagtatttgttcacttctatgtcttcagactagtttctttagccaggcactgaacctcatcttggtggcgtcagagccctgtaaatattggctgaaccaaattagaccctgctgccttcctgctaaatcctgtatttcctgatagattttaagaagtagaggcaaagatcagggcatcaaggtccattgtctttgcacatgctgttcctgcctgtgttcctttacacctctgcagcttcctttctcggccctagcatcacttctgcaaaaaattgtccctgtccacacctccctaggtcatgtcttctagaagttgctctgtcagggagtcagctaggaagtactggtacacagtgactagagtatttgattcatgtttgggtcccctaccaaataagaggtacttagtccatagatgttggcctcagctctaaggttgcttacagtggggctgtaggaacataaaaggataagggtcgactatatgtgatgcaaatcagaggaggctttctgtgggcctgggccatactcagaacctgagagggggcagcaaggtgcagcaccaagtcctgagaaactggatttaggtgctggagcagagctgagcaaatgacccccttgatctccaggcaacatttgtttcaggaacccttgcccttgcaggaatgtgtatttttgcaagacttgcaaggtgactacagccagccaaccctctgcagccctgctaacagacccttcggggctgctcccagaggagccatgggctggcctggtttaagtggtcaggtttcacaacctccccattattagtggggcaattaagaggctgataccatcttgaacacaggtcagtgttttagaaatgagttgtgggcacacttcctcaactacttaaaaaaaattctcttagggtccttgccaggtaaggttgctctttgagtaataaatactgtgttcacacagaagtaatgatttgtaaaacctccagagggaccacaccatcctcatttacactggctcttgcttctagagtggaatggttttgtttgcaactagaagcaagtttggttcataactttaattgtgtcagtcactcatactgaagttctccctccccttgtcttgctggtctagaagcctttttatggaacaaggagttaggaatctactcccacaggtttgtatttagtggcttttcctgcagtgggggaggagggaacatttcttgcctccttacctaaatggggtccaccttctctggtctattatccctggaacataattcctactccccctgcaagaaaacactactccttcaggaattcgggaagccaggatgctggcatcatctttacaatgaaatgcaagtttcccatttaaggcaaatacttcatcacaaaaggtaggaaggaatagggtggtacttggaaaagagaagttccagctggttaaaatttaggttcctgataaaagtccaatccaagaattatccttggctgtgggcccagacatgtttatttgattctgaattggatgcattttcattcacttgcagctcatggctcctaagcccacatctggtctgcctatcgtatggccatgttgtccatgttacagatgctcttgtgtctgttacagaattcttggttaaaaaattactcagtcctggttgatacattttttagagagacgtttttataagcagtgcaaagctttcttccagcctgttttgcctagttaattgggaactcttctggcccatgtccatctttcttgagcagccctcccttctctccccaacctcagccatccacccaaccccaagcccctgcagtgcctggggcattgtgctagttattaacttgggcatatagctccgtgaccaggagaccagcagttaactttttctccaagtgacaccctgggccttccagtatcagaattgcctcaggagcttgttaaaatgcagattgaaagctaatgggatcagagtgagagtgaggtggagcccaggaattggcattttaacaaattcttttgaggatacgcatgctgtaaccaggatgagacctattgttttaggggacaggggtcccacaatccaaagaaggggagaacacacattctaaacatttaaaatcagagtttggctttaaattatgtcactggccttagagaagaatgtgaagactttctcagagccctgaccgataaaaggggtcaggctgggtggggagtgtgaggatgggaggagcagggaagcggggcgggggagaagctagtttggatgggtgcctctggcctggggcagatgaggaggcctggagtgaagaggacttgacacttcccctgagttcctccctagaacagctgggtttgtctgaaaacagtctcaggaaggagtagcacaggatccaaatcagattctcagcagttcaaatcttacaacttcccaacaaaggaaagaactgctagtgcttttaagtatttttcatgcttcatttggcctaaaacatgttttttttttcttttttaaagctttcaaggctttttcttcctctgtccctgaactttttatatactgtgccccagcaggtgtctgctcctgctggggctaccccatcaacaattttattgtcctccttcattccccgctgcctctttttttgagacggagtttcgctctggagcccaggctggagtgcattggcatgatctcagctcactgcaatctccgcctcccaggtttaagcgattctcctgcctcagcctcccgagtagttgggattacaggcgtccaccaccacacccagctaatttttgtatttttagtagagacagggtttcaccatgttggccaggctggtctcgaactcctgatctcagatgatctgtccaccttggcctcccaaagtgctgggattacaggcgtgagccaccgtgcctggccccccactgcctcttcagcctgcttctgatggatgggtttttaggcttctagaacttgagcctccacccttgatttgtaagaatgtggggtgaggagagggctcagctatcagggagcttgacaggttgagaggtgcagtggccttagagcagacctctctctggccaccctgccctggcagccagaccttttccatttcccatctactcccaaatttggagagctcctgccctcagtcagccggggggctgtctgtgctggagctacaggccccatctccagccagccagacttgcccagccagtgggaggcattgtcctcctgggcagtgtttgtcttggctgcttggatgttctgaatgggcctgacacacgattaggtgactgatggcctccgaaacacattgtctcctccggggcccacagcctttgaagctcttcccggtgggaagtaaagagactatttgctctattaaaatgccttggtatttcctctgtttaaccacaggccacttcccctctgccactctaaacccggcagggccaccggctgattgaaaagacacaagccctcaagtgatcacatcctattgaaacagatagtcttactgcagattaaagctagggccagtcttgaagaaacaaatccaaggggggaatctttgagatggcccattatcttgctcagaatttagtctgttgaacagaattcacacttgaagtcctgagtgcataaatgtaaatgtgtctttaaaaaaaaaaaaaaagaagagatatcgacattgtaaattaagtcagtgtgtgttttatctatatatggcaggttaaagcaatccaatcaacaatttctcattgtgtgagttggaaaccctttggtgtctgggaagggcatgttgtctgttcatagaaaaccacaccctgctgctttctctatttgcagattctacctgttcagtcatatgctgaaaagtccaagtaagaaagaagtctgtagcttaaataataccaagaatatctctggggagactccttcatcctttcccaaacaatatattaaaagaaggcttttaattaataacaccaggcaggaaactaaaaattgaacaatttaaaaaattacctacataacaaaaactccatttgtaccatgtttttgtgaagtggcctaaaaaacgaataactagtttctaatagagactgttaacattgatgtttgcaactccattgttcaaagtatccatgataaaaatggattcccttttctttggttccttgtttggaaatgttgggggaaggtggatgtagctaattaaggctacaacatttaaagggggggacttaataggtaccagctgtcctcaacaaatcactgggtggacgacaaaataaagatgtgatgtgaacacacatgtaattctcttctaaaacggaaatgggctcataaattttctgatttaatagtgtaaatgaaaactacctctactgtgcttatttaagaagcattcattttatggtaaaactaatgctaaaatgtcttatttgcatatggctggtaccttaagacttgaaagggcagtagatggcaagtattattggaagcttagtaaattgtaattttattgtacctttcttcattccatacctgatctaatagacgttaatcatgaggcttttcattaaaactactacatggtagggaagcatgcttgaacgtaccagaaaagccatataaaattcaagtatcaactttgaaaacggaatggaaattggtagcattaattaaaatgtttggatggatatttacatttcacacattaaatgaatacttcatatgaatccttttgaaatcatgagggattaggccttaaatacaactttttttcagatgtaaaaagtactttattgccttcaaaactaggagtttttccaagtgttctgtttggtcatttttgtagatcttttccccccattgaatagtaaccctttaaaaaatgctggcagtgtccccagacttctgtgctgcgatggactgttttactcgagagtgggagggttaatgggataaagggagggcttccttggaacgaagaggtgtgttttcctgagataggccatatggtttagaaaccctttccctgtgattttattctgtccgggtgatttctggtttcttctctcccaaaacggcccccttttatctgaggaaaatgcagtgcagtatggaccaaatgtagcagcagtccgccgcctgagcgtggtctctgttgagtgacggtttatggccccttcctctggagtgtgcacatttgctctgggtgcagcacaggcactcacacggttaggatttattgtaactgttcagtatctgaagctcaaaaagacttatttggagtgaggaggcaggagaccctttttttgagcagccaccctgtgttaggttgtgggaccagtcccccgtccacagtggctgcctgtctgggccaggagcaagacaaaggagtaggggcctggacaacagggaaattcaggaagagattctggggccacagtaccgagcactccccgtcctctctccacacttccctactcattccagagaaacttgaacgggcttctgctgctcctcatcctagaactgcccccgtgaaaagcagtttgttgacattcaactgcctgaggccctgcttgaggccaccttagaactctggctttttagcccatgtctcagttggttcccagtatctctggctttttgctctgcctcagtttcccctgctttggaggaggcccccttttctctgtgaggcttctccataccactctctagctttcccatgtgccacaaagcctggccgaccccatcatccctccagatttcatgagaatgtgtccaaacattgcagtgatgcattgagaaacaaacaaatttgatgtttttataggaagaaattgaatttcaatggttcgtgggaggcttagatgaagaagacaggtcttaccaaagggactttgagcagggcctgaccagtgagtggacccaggcgctggggggacagtttgggcagaaagtaagatgtgggcaaagctggagaagggggctcattggtcgggggatggtaaggttgaagatataggtactagataacagggcaccttgaagtttgcctgtgtatgttctgtcagaagtggtgaggcttggaagatttctccaacaggtgaacggtttgataagagggacactcagtggccattcattcattgagtgaatattggtgtgttctgtgtgttaggtctgatttctagagcttagattttattttatttccagagacagggtctctgtcacccaggctggagtgcagcagtggcgtgatcatagcttattgcagtcttgaactcctaggcttaggcaattctcctacctcagcctcccgagtagctgggactacaggcacgtgccaccaagtctggctaattttttacattttttgtagagatggggttttattatgttgcccaggctggtcttgaattcctggcctcaagcgatctgcccacttgggtttacagacatgagccaccatgcctggccagagcttaggttttagtaggggagacaaataggataatgaagtatcagacctgaccatgctctttccaatagcaacttgctgctcactgtcctcttttcttcactttttctctgccgaacttttcaccttgggacatacatagtattttctttgtccatccttcttccccgttgcagtgtcagctccatgtgggtggggtctttacctgttttgttcccttctgcatcacgagaacagtgcctggcacatagtaggttctccatacatgtttcttaaatgactaagcactctacaggaaattaaaatgaggcaataagagcaatgggtgtttgcaagtagacactctccaatggcctctctgaggaggtgacatgtcagtcaagcaactgtaataaaaagttcctctgggcaaggagtggtggctcatacctgtaatcccagcattttgggaggccaaggcaggcggatcacctgaggtcaggagttcaagaccagcctggccaacatggtgaaaccctgtctctactaaaaatacataaattagctgggtatggtgatgtgcacctgtaatcctagctactcaggagactgaggctggagaatcacttgaacccaggaggcggaggttgcagtgagccaagatcgtgccattgtactccagcctgggcaacacagcgagactccgtctcaaaaaaaaaaaatttcctctgaaattgctttcttaacattggctaatcatgtggcagttagtgctgagagtagcataaaaaatatgcttaatttattcattcacaccacagttattggcactcctgccaggggccacatactggttagaggctgggcttcaagccaggttcccactcatgacagggagagtgtgggctggtgttgtgtgggagccacacctggccgagtgtctgttgcttgagggggttgcttggactgtctactttaccctgtgctgtggatgagaaaaatgtgaaaagttactgctaagcactaactaagcatcccggttttggactttctgaaacgatgtgaacggaacaaatctcactccctggcagcagccctcagtttgtatgaaactttgtcttcttaacagaggtgcaggtctcgtttttgtttgcttcgttcccctctggtggtgaatgcatttcattttctgaagccacttgaaggtctgtccataatcagaggtgctctttgccttctttccggggctgcggatttgccggccagctgtggaaatgagtttttgcccggctttgattttcatgccttgcctccccgtgggaggaactagatatttctgatcttacctctgctcatattcagatccagccaagcaatcagtgacttcccgggcttttttgtgggagactgtgggaaaagtcctggttggctggctatgaattaatgaaatccttagaaggcttcactaaagatagctcctgtggcttacaaaaaaaaatggcattgcctttttaatttgagaaggacgtcatggagttttaccaaaattaagcagaaaaaatgtaacatctggttgtgctggcggaagactgcttcagggcctctggagctatgagttcccagtgctggcatgcccaaggtgactgtcacctgcccctatagtgctgctatggacaggccgcctctcattgttctcctccttgggttttgaagtcattgagagacaaattctacctcccacatcttttcacttgagcacatttcccatctactgagctttcttattttacttaaagggtcacacatttttaaaagtacagagttttcgagttgatcaagactagtgtaatcattgcttttatctcattaaaaaaggatgggggtagataatgggggcagcaggccagcgaacttttaaagagttctaaaaaggagagtgagaatggtaaattgctggagaagagttttagggaaaggcatataggagattttaaatggatttatgacgtgtatgtatgtgtgtgtgtgtgtgtgtatatatatatatatatatatataatttttttttttgagacaaggtctcactctgtcactcaggccgaagtgcagtcatgcaattatagctcgttgcagccttgaactcctgggctccagcaatcctcctggcccagtctcctgagtagctgggaccacaggcgtgtgccgccaagcttggctatttttttactttttttttgttaagacagagtttcactgtgttactcaggctagtctcgaactcctggcctcaagcagtcctcctgccttggcctcgcaaagtgctgggattacagacatgagccaccatgccctgcctagagcatacgttttctgaaacgatacaggaagatgaagttgttgccatcccaaccccccaacccctcaagcaggcagctagtcacctgtacaaaatacaggtatatataatatataaaatgtaaatataaatgtatatagtgtgtaaaatgtatgtatataatgtataaaatacagtcacctgtatattagagtcccttacagccccacatggggattccccattattgtgctctttctcccatcctttgtattctgaaaattttcgaatctgtagaagaattgaaataacagtaaaatgaacacccatttcccctttgtctaaagttaccaattcataacgttttgctacacttacctcacttgtccttttaatgtcattcataatttctttctgcatcacattctagggggcagagaagggtcactcattgctttttgatgtcctgtctctttagcctcctttaatacagaacagttcctctacctatttttcggtcctttatagcctacacattctgaagagtcaaggccacttgtgtacacaatttggatttttgattgtttcctcatgaataggttcaaatattttgacaagacccctctaaaggtgatattgtgactttgttggattttacatatcaactggtaacaaatgtagatgcagttttagcaataagaaaaatttgttttttctgtgtgaaattgttgtatttagagatctgtgctaatagtagtacccagtttagtcttgtgttgtctttttaaaaatgcagtgtttcacattaagccttcccttttactttattgagagtctaaggaaatgcaggatgtcatttgtgctatcctgtaataaactttttccttaaagattatttgaaatcaaccacactgtctcaaaatgaggagtgctatttctcaagaatgctcaaggcttttgctattcacatgggcttgttgcagttatagatgtcgccctcagagacggggaatgagttcctattaaagacctgtgtttggccggggcaggtttacggttgactgcttcctcacaccaaaattcagccatttctttcctttgtgctaagaaaacattgaactttatttccagtaaaggctactttactaaaaacgtatcctccaagtcagtttctagccttttagttctgtgattgcatgttacctacattattttattagagtccgttacagacagtttcattagtttaacttgaattattatcttctacctaattacatggcttttgtttctttcattttaccccactccagatttaagggccaagacatgtaaagttaatattggtcatttttcaaagtaagttaaaatgtcaaaaagcaacaagttgttattcttacagggtaccagggaaacaacagagacaaaacctccatcttttattcataagtccagagagactacgagggcgcaggcaggcctgtgtgccgggcgtttgttcagctttcaggactgggcctcctcccctgctggccatgaaatgtcatgccgagatgtaatagtgggacattcagcatccagagaatggtccgcagagattcaactttgcttttcattttcttttctggcaccaagtccacagtcccctctgtggcctgacagtgaaaggccagaaagcagcgatttagatgctggcaggaatggtgtgcagcctctgcccagcgggccggagctcctgggctggaatgcatgctggacacaaaggtcgggtgagggtatgctttggtcgggggcggggggcagcttgcctttgcttggtctcgtttgctctggtcacagccgagagagttcttgtttctatggctatgctacctttagttttgtggaagagggagtgcaaggtgcttttgatttcagaaatcactcagggttaaccatttttgtgtagaaggaggcactgggggcacagtactgagtctgcgcagctccccaggctctgacatttccttcggatgaagcaaacataggcagcatttgctaaacaagcctagactttgatttagagcagtggtttttgattgggggaatttgggggatttcttttttgtttgtttgtttgttttgagacagggtctctatcaaccaggcttgagtgcagtggtgtgatcacagcttacttgcagccttaaccttgatttggggaatttctggagacatttttggttgtcacagctggggtaggctgctcctggcagtcaatgggaagggctcagggatgttgctaaacatcttgaaatgcacaagtcagtcctccatgacaaaaaattacctggcctaaaatgtaaatagcgctgagactgagaaaccctgatttaggggtcccatcttagtattttgatttctcagccctcttagcctcataacacttttgagcttcctatctgtttaacagaagctgctggttctataaatttgcactcaggatgaatttccatgaaactctccaagacatatgattaaattattgtggtgctccttgaagatatgccctgaatgcaactactattttaaatgcaaaagacaattttttgccataatttgatcaaagtagcataacctgtgcctctgtttttgttactcactgatggtctgtggataacattacattttttcagcatgaaacccaacacttcaaatccctaaagcagtctcaaatttatggttaataaaagcatttattgtactggatgtcatctgttatatcactctggggctagaaactggcaagcagtggacaggaaatattttcatttcaaatcgcttcaatcttatggtctaggggcaaaagtgtctgatttcaggaaagccgcagtgaatagcatagtaatgaatgcatttttagttgattaagcaggcattctctccctttcaaacaatcttccctctttggcttggaggggctaaataaacatgtgatattaaatgatagcatttcttgtgttggccatgccttttctttgatcatcttaaacttttcaaagtgttttccaggaatcctcagcagagcaggagcaagccagaggagaatggctaaactcaagttttggcccccttcgtaattgtttactttctgagcagaggaggttttctgagaagatgctgactcttctgaattcctctttaaaaatggaatttggtacctcacccttgggatcatgaatttaggaggaaaaaatattttgagtttttgtttattttcaaaaagtctgcaattttattgtaatttgagtcccgatctctcacatccatcaggtaaagagggtgaggagagttccatccagaggaaatctggtgaggcgatgacatatccgggacagtgtacctttcgtcctgactgcccagcctttgaacatgttacctaagtcatcacttcccagcaagcctcggaggtagacaattatttctgatgtggttcccttttttccagatgaggattccatggcacaaagagccaggaagggattaagatgagaatccttgtgactcggagaggcctctctctgccagaaaccggagctgcagagttcttaccctgcccatgcccccagcagtcgggcttgccctgccttccaagcaccctgtctcagatggacggctgccatgtgcaacaaagcaactaatggggggtggaaagaggcgagactagacagcactttggagataattaaattaaactcagattaggcaattaccccaaagattcccaaacctggctgaacaccagaatcacctgaggagcattcttggagtggggggagattccgggcctcaccccagacctgcttaagtgggatttccaggggaaggccaggaatctgagtttttaaaaaagctgccagattagtgattgccagggttttggagggatggagggagggcttgactaccaaggggcagtacaagggaattttttgggttgatgggactgttctgtatactgattatagcagtggatacatacatatatatgcatataacttgtggacccatacaccaaaaactgtcaattgtactgtgtaaataaaaataaatatgctgcccaggtgaaactgagttatctaggtgtcagttgagatggcctgtggtgcctggtgacagctgggaagagctgcccagctatgagagagtgtcacctgttattgcagaggcaggcgtgggcaggtgctgaactctttagcccagtgctatccaacagaacttcctgtgacaaaaaatgttcttcccagcaccgttcaattcagtaaccatcaaccacttttggctactgagtacctgaaatgtggctagcacaactaaggaactgaatgtttaattttacttaaacttaatttaaatttaaatcatcacacatggctagaggctaccctattggacagctcaccctcaaaggtagacatggtgatatcatggagctttggctctgtgcaggatgcacaccgtggtactttatactcgagggacaatagtaagtcatcccaaacattgggtaaaatggaaacatggacaggacttaccaatatgggtaagtacagagaagaaggaaccttgggatgaagactcacctgagatctgcccaggcagaggacaattctgccgagtgaaggaatcggcttttttttttttttttgagatggagtttcgctcttgtcacccaggctggaatgtaatggcgtgatttcagctcacttcaacttccacctcctgggttcaagcgattctcctgcctcagcctcccatgtagctgggatgacagacaagtgccaccacacccagctaatttttgtatttttcaccatgttggccaggctggtcttgaactcctgacctcagatgatcggcccgccttggcctcccaaagtgctaggactacaggcgtgagccaccacgcctggccaggaatctgctttttcttctccaaagatagcaccatctttggcccacttccttccccaaccttccaaccttgttcattttaaaaggtgcagaggttagttgggatgctcttgaattatgctcccattcttctgcagtgataggatatacaggaagccatcagaggggccaggtgagctcagtgcagagaggtggggatgttctgggcttcactgggcccacctgcctccctagacagagtgtgatgaagaatctgtgtgggcatattgtattcctttttggggaaggagagcatataaaaaaggcaattaggcataaacttcctgctttatgctttgagcacatgacctttaccttggcttgtgttcagacgctcctaaacccacctcctcgacccccattgatttatgttatcttagtgttacttttccaaatgtgttataaaagaatgagattcagggagtgtggacttttattagtacaaaccaaatggtggcagaaagaatgttccaatttgtaaacatatgtgttcttaaataaatttgctaaatgggtaacaaaaaatttcgtgagctatggtcttataactggaggttttgttaatctgatttaaaaataggactgacttgaaagcgtaaaaatggggaggtaggtttaaaattagtgggtcttctttccttttttcttttcttttttttttttttttgagatagagtctcgctctgttgcccaggctggagtgcagtggcaccatcttggctcactgcaacctctgccttctgggttcaagcgattctcctgcctcagcctcctgagtagctgagattacaggcgtgcgccaccacacctggctaatttttgtattagtagagacggggtttcactgtgttggtcaggctggtcttgaactcttgacctagcgatcgccccccccccccccccaaccttggcctcccaaagtgctgggattacaggtgtgagccaccgtgcccaacattctttattttttatatgaaaacttgacttctttcgatcaggaagagaacatcctggatggatcataacatctctaaggagagtttccttgtgttgcctttacaaattggttacttcaaccttataagaaaaatgaagcttactgagtattaagctccattacatactgattcttctacccttgaacacacaaacagatcttgttgcatagctgctataatcactgtgttttatttatttatggttattttttacttatgtttgttttccaaagatatttccatgtattgatgtagtgcacagacatgtcacttttagtggccatatgatatgttcatgtagtaagctcccctcccctttttgccagtcctgtccccacatttgatgaggcatttgggctgtttccgagttattactgttacaaagctgctatgaacatcttcatacagatgggttacctgcccatctcccttgccgttttggtttatttccttggcatttattccccaaagtggaattactgggtcaaaggatttgtggctctcatttcatacatgtttaccagcttgtcctgtataatgactgaaccagtttactgggaggaattgtgttttgagaaaagaataggtttgtttcacgaatcccagctccaccatttgctaccatttattgagaccttgggcaaatttttccctgaggctatttcttcatctgtaaaatgtgttattaatagttcatctcccagggttgttgtttgttttaagatgtaagcaagatactgtttttaaaacatccagctctgtgcctggccacatggtaactgcttagtgactggctgcagtctttttatcagcagtatacatgtactcattcttctccatcctaataatattgacatttatcagccaggtgggttaagcctatgatcccatcagtttgggaggccaaggtggacgaatcacctgaggtcaggagtttgagaccagcttggccaatgtggtgaaaccctgtctctactaaaaatacaaaaaaaaaaaaaaaaaaattagccgggcatggttgttgggcacctgtaatcccagctgctcgggaagctgaggcaggataattgcttgaacccaggaggcatagataggttgcagtgagtcaagattgtgccattgcactccagtctgggcgacagagactccatctaaaaaaaaaaaaaaaaaaaagaatacctctcacacacacacgaaatattgacgtttatataattttttttctttcttttttttttttttttgagatgcagtctcactctgttgcccaggctggagtgcagtggcgtaatcttggctcaccgcaacctctgcctcctgggttcaagcgattctcctgcttcagcctcctgagtagctgggattacaggcatgcaccatcacgctcagctaattttgtatttttagtagagatggggtttctccatgttgatcaggctggtctcgaactcccaaccacaggtgatctgcccaccttggccttccaacgtgctgggattacaggcatgagccaccgcgcccagccccaagtataatttttctttacctttgttattttggtggtagcttatacttgtttgattttggattttttagagaaggactaaatctttcacctggtgatttaccttctgagtatgttttagtgcctttaagtctagaaatattaaagctaggtgtgggcgaaatgtcgcttagtagagagtgttagggaagatgttttaagtgaataaataagaatttaaagtaagaatttaaaataattattgattagtaagtctaagaattattgattagtgagtcttcctgacttaccagcatattatgaaaataattgaatctgaatattatcatggaaattctatttgtactgccaatttagccagcaaacctttgttcctttgtatgtgtgtgtgtgcacgtgcatgcatcagtgtgtgtgtgtgtgcgcgcgcgcgcgcgtgagtgtgtgtgtgcgcgcacgctttccccaaagtctttggattgatcgcacattacccataaagagaatatatattaattctgttttattggagtttaaaaaaaatcccgatcttgggctagaagccaccctggttaggctgtctcattgaggtcactgtgacatgtgtgatgagagcatctcaggctgactgcttgtgactatggacagggcaggtgacccataaggctgtcagtttccttactacctgtaaagtgggacagttacactagaattattctcaagattttaactattatttttattgaggtgatttgaacctttaattcagagggtgtaattgtcctgtcctacccactccgtgtccttattgagttgcccacctcttttgctacctagacacttgccccttgcacctgggtgtctgtttttcatctcacttgggaaagaacacccaacctctgaccattgttgcagatctttctctaatacaagaaaagcatttgtcctacatatagtttttattttttaaattgagacacagctttatttttgcaaaatgtggcctgtcggctctgctggtcacttttgatgtgcctgtgttgcttgcgtacatggagggtgcccacgtctccatctgccttcatccttcacaatttcatgtgtgatcacccagcttatccacatggccaaagacccggtgcatctcccaatttttaacatcaacactattgttaatgattgattacaacccatttagtcttctgggccaggagcttttagggcccaatcaatcagtgaatccataaacaaggggactgcctcagactccctgggagctctgaatcacactggggtgttgacagtcccagaggcctttctgtcagcaactgtctgggttggagaggatttgggtactgtgctaggtgttggcgagggcagaagaaaggcagtcacagatacagaaatagtttgtttgacagttgatctgcatatgggtaattgcagaactgagtcgttcattttttaccctctttactcccatttacaccaagctgtcttcttgtcaggaaagctggaagtcagaatagtgatacacacatacacacacacctacaccttcctcacctgtttttaaaaatgactccttcctgggaaccccaacatgaagcagataagagtgcagcagctctggttgaagagagtggggagaaggaccctggctgagccccgccccacccacaggtccttgcctctcatgcaggcattgctgttctgtgggtttccctctcagtccaagaacttatcctgagtgattgtccacctgccctggttgacgtggcattgttttagtaggtcctctgggatgatccctggatatgataagaacatttctggaagagccctgtaaaagcaattccttcccctccacaagggtgagtttgggactacccttaatacaccagagtgaagatcctggacttagagtacatgggtgggtggacttaaagggaccagggagacagagaagataaaaacagagataagctttaagaagataaggttatagcttgcactggcatcctgtcgtgggcaggagaggaaccaagaatgcctgataggctgtcaggaagatggactcctccacagggtctgtgacacaagccagaggaggaagagatggtgaacggctagggaaaggaagagatggtgagcggctagggaagaggtcactcattcagagaccaaaagggcaactgtgtgtgataacaggccctagagtatgagggcaccaacaaggctgacttgatgaaataccttatctccaggggtcacaccccctggaagcacactgagcttagacagaagtgatgacaagttgttttgggaagggaccgtggttgaaaccagtgcctccacctgcagcagtttactaggggctctttgccctcattctgccctgggctgattgaagcttcagccacctttgcagaaagctcttggcttctggtgagaacatcttgaaatgggcctaatatctgtggaaactgaaaaatgagaccaatggtgtggactatttccacagttctgatatgcctcttgcccctgtaggtacagaaatatttaattccaaataattgacttgagttgtaacgctgtgttctaatttggaaacgtgaagctgaccacttccagaaggtgcccccctcgccttcactcagaaaagccgggtgtgtctcttccacccgaacatcactgccctaggcacattgcactcattttcctagggcctggccctggactctgcacatcctgggagctctatgaagaagggcaggattaccctattgagtacagatattcctctcacacacattgagggctttgcattaaagtggtttatgtggggccagcgtttttgggtgcatatgaagcctaggggatttgtgacttggcagatttgtgtgtaagcacagctccccagcctcctgcctacttctgataggggtactggcagccttcagggactgaggctgtagaccctggagatgttccttgcactctagggaggcagtagcagggcaccttcaggactggctcctctgagggagtccctgtttttacctcatcactgatgagaatgacgtagcctttgttgagattgtcgtagcctttgttgagattgtcaaggtagagtggagataggtccctccagcactgagacagttttgtgcctgtgcaaacaaaatacttcaaaaaggatactgcccctgcctccatcctggtgtaaggtggcagaaggaagcagtggctgacagcggagttaaacacactttaaggtaggtcaaatttttgacataccgttttcctctgccgtaccagcagctgctctctactttgaaagggggcttagctgctcacataaactttggtttgtgataatgtaaactattattaggattatctttttattcataatatatgcctgattctctgtctactttatttatgctccgtttgaaacactcatttaccttcaatactcagagccagcatcaacccctctgaaaatgaagggaaactttataacagattatttaaatctctctgtggttaaaaaggactctgggaatgaaatcattgggttgaggaagcttcaaatctcagcaaagcttccaggttaaaactgggatgcgatgttgacaaaacattccagtttaaagtttttttttttaaatgaagctttatccccagggtggtggttttcataaagaaatgcttgattctcagttgagaatttttggccttcaaagtctcctcttccctcccaccaacctcccccccgccccgcccaacttttcatcaccacctggtggaaccatttgtcaatgaggacgttctggaagttagagaagttcctgaggctcaggttggcgacaccaacacagcggtcagccaggccctatctccctgccaggaggccggagtgggggaggtcagacggggcggttggagggggagggatgccacgcgcttctgcctcaggtgttcctgcgttgtttgtcagtggagagcaggttagtgggtgagccaagaaaaaccaataagtgtttcaatttttaataaaatgtctctcctaccctttgtttctccctccacttctccacaaaagaaagaacagagtgaatttttaagcacatctggacactgtttttgtaaaacttttaccctgaattcccagaaggaatgtattggctcccatttttccaagcaaaaactgaaatgattcctttgtttataagtactgtgcttgcatagtttaataaaacagtaaagaaaggaattgcactgatttgaaaacctttagctagtccgaagctttgccctttatgcctctcttgaagtctttgagaggtgctaaaagtttatggttggttatttttggtgtcagtgggaaagggagagttaggaaggctccgtgtgtccctttttgaattttttttttcctgtggctataagagcgtttaggcaatggggcaggggctgctcttggtccttgttcctctgttctgcttcctctaccatgcagtgccctctggtgaaaaccgtgcagatacaatcagataacagtgttccagatctgagagcccaaggcctgcggtggaagacaaaatccatcttttccttatcagatagtgtttgtttttttcttaggtgattcttctgtaagcctattgttgccaagaaaatgaagttgatctttcattaataccagtcttattaggatgttggcatggtgttctagtatggggagaattgcaaaagaaacttagagtgtcaagctttttttttcctcccagaaatgtttattataacaaatattaataacatttagcagtttgtgtatacagataatgtacaaaaaatagaccttcaaaaatttctaatctgaagtgacaaataattaatgtttaataatcactagttgttctgctcaggattatattcaattgtatatagtatttttaattcaaacaatacattagagaacaaagaatattttaatgtttattccatccctcagaaatgaaaactgctaacaatacaaaaaatagctacatattccctgaaaaataagtcctcagtgtcaagcttttaaagatgaaatacagagacatttgctattttggggaacttgtaagatgacatggttctgttcagaccggtggttatagaagttcttttttatgccctcaaaaattatgttttttaattaaagttatattgtcaggaaaacatcagcatactgtggttaagttatgagggtcggctgggtgctgtggctcacgtctgtaatcccgacacattgggaggcttaggcaggaggattgcttgagcccaggagtttcagcccagccagggcaacatagcaagaccccatctctacaaagaatgaacttttaaaaattagccaggcatgatggtacacgcctgtagttctcccagctacttagaaggctgaggcagaggatcgtttgagcccaggagttggaggctgcagtgagccatgattgtaccactgtactccagcctgggcaacagagtgagaccttgtctccaattaaaaaaaaaaaaagtgtgaaggtcagtcacagctctgctactgcataataaatgttcattagtgataagcattgaaccagtgtaatagttactgtttcctagaatattactttccctagacctgttctgggtgtctggaaataaattctagaggtgtaatattcccagagtagacctcatctcagagatcaatcaaatttcagagatgaccacacctcagcttttctacactacttttgagaaagaaagttgttagccatgatgccaaaactgacccactaagcctttcggggctatggatgtacatctgtcaaatggcagcaaatgttgaataatgcccaaaacaggatggtctgaaaattaatacttgtattagtgccatcatgcaaacattcaccatttttgtgagcttttaacaaaaatggtttgcctgaattgaaatctaattcgataactttgagtcctactgataccattctagccaatcttttgaacttttatttctctttgagttctgggaaattgtcagttattctaaatgctagctcgtagaccagttggttaggagtatctggttaaaaaaaatgacctgatttagagctcgtagttcagtgtgggtagtctctacattttccatgtagcattgtttcaaaaactgcaaaaaggtatattttaacagtggttcaaactgtaaagtgctgagcagatcttggggaacatcaagacatgggttctctgtgttcttctccataatgtgggagattagagggctgtctggcagaattgtgagctctgagcacagccttgcctctaaggtgcccggctcggtatctttatgcagaagcctgacagtgaactagcagtcttttcagtacttttttccagggccagatttttttttttaagttttaaacatatgaaaacatttgattcaaatggtcctaataatatgttttctatttttcctgtaaaaccaggagttgagtttgaataacagcagaaaacttaggaattaatatagaggagctattttaaatgatctagcagtataattatttgctcagagatttgtgtaatcaaaaaggttttcagccaggcgaggtggctcacacctgtaatcctagcacttttggaggaaggctgaggtgggcggatcacctgaggtcaggagttcaaggccagcctggccaacatggtgaaaccctgtctctactaaaaatacaaaaattagcctggcgtggtggcacgtgcctgtactcccagctacccaggaggctgaggcaggagaatcactggaaccaggaggcagaggctgcattgagctgagatcatgccactgcactacagcctgggagacagagcaagaccccgtctcaaaaaaaaaaaaaaaaggaaattttcattgcatgtaccccataaataatatacacatatttgtatatataatattcacactcaaattcacattcagttcaaaattacacaaaaattcaaaataaaaaatttaaacaaaggaaaaagtttaaaaagcatttaaaaagatggttttcatgttgaaaacatccatcttgacattcttttacccgtagcctgtttaatattctttattttgactgtatttcattctcctactttgccaaactcactttttcaatctttttcctccatgcgtgccctaactatgggtagtctcacaaagcccaattcctggctttttgttatttttttacactttctgttaattttgtatacctcttatgaattagcctatctgtccttaagtttctgtggcatgccgtcatacatgacgtcctgccttttaatcctgcatttctcccctccccccaaaatatatgatattgtaaaaagatagtaggcacctcactttcactgtttttctgcagcctactttttaaaaaaagaccctctttccccagtgttctctttttttttttttttttttttttgagatggagttttgctcctgttgcccaggctggagtgcaatggtgcaatctcagctcactgcaacctctgcctcccgggttgaagctattctcctgcctcagcctcctgagtagctgggattacaggcatgcaccaccatgcccagctaattttttgtatttttttagtagagatggggtttcttcatgttggtcaggctggtctcgagctcccaacctcaggtgatctgcctgccttggcatcccaaagtgctgggattacaggtgtgagccaccgcacctggcccccagtattctcgttattgccttaaaatcactatcttccgacttccccaaataagagcctgcaggtcacctttgaatatttcatcatcacctcggtattgtatttgtcaccaagtcctgctattttttccttaaaaatgcctctcagacctgtcctttgatcctcatcagtacattgctgtccctgtcatgttatatgtggactgctgcagttgctggctatctggtctacctcgctccagtcttccaccctctagtctctagttcttcctgcatatgtggccctaacactgttttgttgttatcattcctttcctggttcagtttcctttaatgttttttgtttgtttgttttgtttttacttttttctttattgtgttgaaatacacataacataaaatttaccattttaaccattttaaatgtacagttcaaagatttttaagtaaattcacaatgttttgcaaccatcaccaccatccacctgtagaactttttcaccttcctaaatggaaattccataaccattaaacaataactccccattctcctctccccgcagcccctggctatctctattcatgtctctatgaatttgactgctctaaataccgcatataaatgtagtcatacagtattgtcctttctgtccttttgtgccaatgtcaaatttttaaagattgtttttagtggtcttgatctgtagggaagttgatgaagatttggtaaaagctaacaaagggcctttgctttgagtcttcttatctctttagtatttaatgagctctgtttggaagcatgacactggtttactctgagtacagacaggaaagtcaaggtgtgtaagagcaacaggggaagattagagactcccaacttaggcctctgtggcactaacctaataccaaaagttttttgtcatggagggaagagaagtgaaaattggaagcggctggtgaccaggactcaccttcctccttcttaaataccttccatctgtattaggggcagggaatcaatttccatcttgaaatggatatgtgttttgagaccccagctccagtcttctgttttataagtgtcacttctgctctccaggccctggggtttgactcatcccatctgttcaattcttgggtcctttggattcatcctttgaagctgctgtttcattgcctctttcttccttcctcatctccccacctaccccattgccaccttggcctgtatcagagaccttttccctgtgcttctgtctgccaaatctaggcttgtgctcacatctgtaaggaccactgtatttggatcttgcctgtctccaagatgtaccacatgcaaagctgaacccacttggctatttcagccctatggtgcccatcttttcaggccagttgggggtgtctaacacagaagcaatgagggtgtgttggtcacttccagggatgtgggaagtgtttattctggatgaccaggaagactctgtgtcatccctgagaaatagcaaccatttcctgaatgcttaccatgtgttgggcactgggtggtacagttggtagcacaagctcctgggtctgtgtttgcttgaaataaacttccttcccctccgcaaccccaaagcttgacatgcctcctctgaagacacttctctggctagccttcctctgttcaattaccccttgtctgaaatcttattacacatagagctcagtggcataacttagcccattcattctaggcagtgtaaccttatctactgtagtttcgtgtcttttagctttgttttccaaaactaattgtaaacacctagaggcaggggtctagtttagccttattctcactcaaaatggctttcccaagtgcaaaagcatatttcaagctcttgagacatctggttgataaatcctggggcatttgcagaggtttttcatggataaatgagaaggagagaatcctaaaagcaagttaaatattgcttttagatcagctaagtttttttttttttttttttttttgagtgggggttgggggcgggggaggggtagacagagctttgctctgtttcccaggctggagtgcagtggtgcaatcactgcatcctcaacctcctgggctcaagagatcctcctcagcagctgggactacaggcgtatgccaccacacccagctaattattcttatttttcatacagatggggtctatgagatggagtccaggctggtcttgaattcctggtctcgagcattcctgctgccttggcctcccaaaatgctgggattacaggtgggagccaccatccctggccaggctgtttttgaggcagagctcattctttcttcttccacacctgggctacatatgtgttgtgattctaatcacaaaatggaatttaccgttttttaccagtgagtggtttttatctccttagcttgatctgtaaaatcaagccaccctgactctctggaaagagttggaggtcttaggtttccacacggctgtaatgtgattgttgtgctggagagaggaagacattgttatctgcttcctggatttgccagtttcccttttaattttacacagttctgttattcactggagaccagtcatctaatcataaaatcccctacatttatgtaattttaaagaaacatacaggataaattatagtaatttggttaccctgcagaacagcgtttaggatacccacatcaataggcaacctaccagcgtatcaacgtgtgtatactgtgcaagtagccttgtcaccgtgtcctcttgccttttccatgtacacagccggctctggagcaggtgacggggcctgctatactacttcctactaatggtgttttccctttgtagaaaatgatggttgatgacagttgataagacccttagaaagaattttgcccagtggtcctaactcactttattaggctctttttgttatttcctccatagatcttacatatttcacccagaaggaactgcattaactgatagctggtggagatttatgagagcaaatgttatatatattaggatctaatttatgtcaagtcacagtccatgtgatgcaggcagtaaagaccgtctggaagagtcttcttcaaaatgatggaatgggagaagtttcatattcttctttgtacttaattttattttaccttgaacttgttatctttacaaaaataataaagctgtcttcaaaagaaaagcctacagttctagaaacttgaaaacccactcttagggaatctctgagaatcattgagcatcccaccacttcgcaggcagttggggaagtggcaggcaggaagtggcacatcctggcctggccttctgcctcctcccagcctcctgcccaccttgctctgaacctgctgtgcctttggggcttcacctcctcagtgctccaggaaatgcttgaatctgtgtccctagaagcagtgctgctcacctgacagcttggcctcacactgacccagctccccattctttgttttttttgtgtgttttttgtttgtttgtttgtttttgtttgttttgagacaaggtcttgctctgttgcccaggctggagggtagtggagtgatcatggctcactgctacttccatctcctgggctcaagccatccttccatatcaacctcccaagtagctgggactacaggtgcatgccaccatacctggccaatttttgtgtttttgttggtagagatggggtttcaccatgttgtccaggctggtctgaaactctggggctcaataatccccctgcctcaaagtgctgggattgcaggattgagccaccacacctagcccccattcttagcttatttatttatttatggcaggtaaaggcttgttttattttagtggttgatctacgtaatcgctgaggccagtatgtacagacaaagggggagctttcacttctcggtctcttcctccttagacaaagtcttgatgatctcctccttggcctgtaggcggtcttcatggtgcttgcgtgcttccttggtcttagacctgcgggccttagcctggtcagcctgcagcttcttgtgggccttgtctgccttcagcttgaggatgtgttccatgagaatccacttgtttttgaacacattccccttcaccttcaggtacaggctgtgatatgtgtggtgatcaatcttcttagattcacagtatcttctcagcagccagcacagaatccgcattctcctcatccaagttacgttccctggcatttgggcattggctgtaccctttcgcttacttatgcccatgtgcctgcccttccagcgggccaaggtgttttcccggcatcaagcccgggaatggaaagtcacaggtttgtagatgatcagcccatctttgatcagcttctggatctgctgatggaagttggcattggcgatttcattggtcttattggggtccaaccagaccttcttcttgccacagcagaggacactaaaggcgagcctcatctgaaacctgagcatactcatggctgtggccgcagcagcgaaagcaatgagctccccgattcttagtttaaagtcagtttagccagaacctttggactttcctttaaaaaagaattaatcactgcttttaatcttttctggttagcttctgtttcatgctaacttcatgacaaaatgttacaggtttctaatttaatttcaccatattactttgattttgtaaacatttctccatgggaagccttaatgaagtggcaagatacattgatttctttctgttgacaggtgaagggacaaggttgtatgtgccatttacttgcctcagccctataggagaggactaggaacacaccaccaggcccacttcatcaggggtggaaatatgctcctacctgctgttccatctgctgcgtctgcctcacaatggatttgctttataattgacctctctataccactccttgccagaaatccttggagagggagtgcagggagaccttaattcctgggaacaccccactgccttcttcacccacaaaaaagacatttatcaaaatctaaaattgaccaagacatcagtacttcatttttacatcattctttgccttctccgaatgacattttagtggttcaaggaaattaaaacaaagctgaatactccttggcaagcataattatttcctggcctaaatgtcatacaatgatttaattggtatgtcattgtgtgtatgtgtgtttgcatgtgtgtgtgtgtgctttaatggaaattccatgtggtatctttgggaaattaggaaagagagtcttctagatttattgcttatagtttaagaacagactgctggcttccatccaaatagtaggacgatgtaaagttacagggatcattagtgtttgaatatatccttccgattgcctgctattttaaaattagtttggcaaaaggtaaaagtcagaactgacagtgaaattttttacgctttgaaacttgtaacattcatcaaaataaacttgtgggggacttggcatcatgtaagcgatggtgtcctttgctttataccaacatcttaattttgaagctgaatgagttttgctgtggctggagtaggagtcagagacatagattattcattttggaaagttggaattttagattatccttcatagtggctcatgcacagatactataaaatatatcccaaacccaactcagttttgtgtgttgaccgcaaataccatactctgcaaaggcagttgagcaggagtgggaaaatcagctgttttcttcatctagtggacactatgagtattttcctccacactcagtgatgaaaaaaaaagaataagaattagccacatcctagttcactttttatcttgattcagtgcaactgacttggctgcagacataactgttgtcacctgtgatccgaaaggtgctagatacctctgtcttgatgggtttatgtgctcaacagtgtaagttgttgcctttcatgtttctactttgtaaagttcatgagtcccagcatcttggacaaagtgtttagttactgagttgtaacaaatactgcctataaaggattacagttggatggcattaatccaataattatatttaaaatggagattttacatcaaccacttccctcccccattagaattttttgtttgtttttgttgttgttgttgtttttgagacagagtcttactctgtcgcccaggctagagtgcagtggtgcgatctcggctcactgcaacctctgcctcctgggttccagcgattctcctgcctcagcctcccgagtagctgggattacaggcaggtgccaccacgcctggctaaatttttttttgtattattagccatgttgaccaggctggtctcgaactcctgaccttgtgatcccccaacttcggcctcccaaaatgctgggattacaaatgtgagccgctgcgcccgccccttcttttacagtgtcttgctctgtcacccagtctggagtgtggtggtgtgatctcggctcactacggtcacaacctccttggctcaagcgatccccctgcctcagcctcccaagtagctgggaccacaggtgtgtaccaccatgtctggctaatatttttgtactttttgtagaatgggtttcaccgttttgcccaggctggtcttaaactcctgagctcaagcaatccgctggcctccgcctcccaaaatgctgggattacaggtgtgagccaccatggctggcctgaattttgtttttaatcaccgaagtaaaaccactctctattattcaacagacgtagctttaagctatcaagctattgagtggagctggactataaggcaggtgagaggtctgggggcttcaggggtccagaagcctcctgaaaataccatgtgccaatgtgtgtgcacacatgcaccacagttctcccccaaataaaaagctgtgagtcttggtaatgaggggtaaatgagagcaaagtgattttggccttggtggtgatagtattgccaagagagggatgacggtaggattgcagctgtatagcaactcacactcaccccgttttcagatctcaccagtgtttttctgaaggcctcaggatatcactcaaaccttcaaagtccttgcatcttgaggccaaactttgtacttcagtccatgaacacatgaacagagtgcacctgtggttgatgggcattgggctgggtgtggcacagcctgggactcctgttggctgaatactttcacctttctttgtttcacccttcttaaggcaggacggtggtattttgtaaccagtgggcactcagcgagtgtgagttgcatgcttatactgaaaggttctaggaaatcaggtttggaggctctttctgtagaaaggcagtgctgctcgcccaacattgagacttgatatttctcccaagtaactgggattcccacagcttggggagaatcaagacagttgagagtggtgggctggaggaacagctgaggtaggagggggtgggggaggggaagcttgttcacatgcttgttaacatttaagggtctttgacaaaggaagtctaatgccttgccccggtcagccggtgattgccccccgggaggccccgttgtgcacaggaagtcagacactaatgatgttagcgaggggacaaaggcgcctggcctgggaagggtctaattgctgtgtccggctcccaggcggctggcctcaagctggtgggggctgggcaggatgcgctaagtgttaacacctggagccggcactgctgacttcctggtgcttttttgttgttgttgttggctttgtggctgggcacacatactgacaacacacacactcaaaggcattcagaaaccctgactgcatctcagggggatgtttcaggacttgctatctaagagactagatggaaatggtttgatcaggaggtaacaccgtgagtgtcacccctgggccgggcagggccgtgaaacaggaggctttactcctgtttctcctcccatctgcccgtcagagcttggtgactgtggcttcacctctgggctgactacttccctctcccccagaaagcttctgggaaaggccagaccttgcagagagaggcagatacttattagaagggtcactctggctttagcttagaacattctagtcagaatgaatgggagaatattcactcctggaggacagagagaaccagctggggtcacccaagggtggttatggtatatgtgtggatattttatatattgctatttgaattcacacctggagaggtagttggagggtctgcatcccagggaactggcaaagccaagatgcaccctttgatttctgagtggggtcttgggattttttgtgtctaaacatggctttggacctgggggcctgtgaacccctcagaggcccttgggtggccttcatgagctctgggaacctcccaaaattgtgtatgaaaagtttctgggggaaattgggtaaggattatttttcacaggattctccaaaggttctagtaaacttttcctcttaacaaaaacagggtcatcagtaattaaaagcaaatacaccctgccttggccagtagccctgcagggtgggattagaggttcagttcagcaagggtaaggctacctggagcctgaggtgggctactaatggcaggcagttttgagcacaggttgactcacttggatttttgcagctagagaacaggggcatttaaaaggatgcttgaagcctgtctccttcctagagaaagtgggggaaagccacacattttgaaaaagggcctaatgctgacttactgcttcccactgttattttaaggtttttctgtccgagaccaccatgtggacagacttaatcggctgacagaaggggttgccttgctttctagcatgtcctgtaatatttccattaacactgaaacctaaaatgatggccttccataatttccaaatatgcgaaatccaccttgaaggaaatgtgcgtggggcttgccggggacctgttggggtggaggaggctgggtccccatggcaacgtcacaatcccccatttctataggcatttgtgctgtaaaagcagaattccagatgtggcttagtatttggagactcagtccctgtgcctcggaaacagtggtatttgaagtcagcacaattcggtgcacctctctgtgtggtcctaaggcttttcattagtagttgtgttttgatctgaacatttcctctcagcttaggcataacaatcatgtttatagctttaagttttcctctattgtctaatcactattttgccctcataggaagagactttttcggcttctggagtgaagtctttgtaactgttcctttcacggctaagtgagagtgagtcagtagccgatttgctgggtgggtatttgggtggttggttgtttgcttcctctttgtacccagtatttatggaaaaagcatacacagacacagttaatctgagtctgtgtatgctttttaaactacagatgggttgactgttaccttaaagatgccagttctctaacatgcggttctcatttgagtggatgggagtggtgtgcgaagcggagggaaaggtctggctctctgtccataggcatgttttatagcgtgtctctaacgttttcggaattggaaaaatggaacaatcctgtctatttgtgattatcagccatgggagaacacacagcccagatccttaacagactaattggaaaaagtacttgagtttttgctttgtgagaactaaagagactgcacaactttgttttgccttgtttttaaacccagggagaaagtttgcttgtgtgcattgcgtgtgtgtgtgtctgtgttgatatctctgggttttagctgcacggctggttccagtggcaaagcaataagaaaatcataaagtcaggcgtggggaagaacattaaaaaatatatgcagttccattcaggccaccatcatttagagaagttgctgtcggagaaacaactcacaccaatgtcctaacatatctttatctttagtgaatggatttcctaacatatctttatctttagtgaatggatttcggggggcaaagtgggtggaggggtgggatagtgaaaagaaatttggatgaaaactagagctttcagtttgataagcaggacacatggtaacttggcatgggtcggcctcatgttagagctcagaaacaattgtcccttcagctttcctttggagagcgtgaaattaggaacatgtgtgtgctgattagcaacatgtcagagatgaatcacgattacggctttggtctggtgcacaggcggtgctctggagtagtgatttcctacttccccgagcaaatctctttaattagcttaagatctccgggtctttttgggccaatgtggtaattgctggtgggaacccagcagcactccccaagagcttgtgtgttccttgctacgcatccaagacctcacctccaaatcagactgctggcatccttcatttctgaagttggttgcatctcaatttgagagagagagagaacagctcctgggaatgtggagagaatatcttgaacagatccaggcccaggctggcttttgatttattttccctgcgttttgcgttcaccagcattctcttcagcttacatcacctggggcttctctgcctttgccgactttttgttgttgttgttaaaggtttgaactgaagtaagtggggtctatctttgtttaggaaaccatctgaactggcatggagtcaaatggccccatattctgcttcgtctcacccttctcatgtccattggtcagagacaaagatgttagtcccgttgtacgttttaagcctcacagcactgtctgctgttacacagtggaagcccaagatggagaaaattttatagaaaaacagaaagtatggctgggcttggtggctcacgcctgtaatcccagcactttgggaggccaaggcgggcagatctcttgagatcaggagttcgagaccaggctgactaacatggggaaacacctgtctctactaaaaatacaaaaattagccagacatggtggtgggcgcctgtaatcccagctacttgggaagctgaggcaaaaaaatctcttgaacccaggaggtggagactgcagtgagccaagatcacgctattgcactccagcctgggcgacaaagcaagactcttatctcaaaaaaaaaatatatatatatatatatttatttatttatttatttatatatatatatttatatttatatatatttatatatatttttatatatatttatatatatttttatatatttttatatatatttatatatatttatatatatttttatatatatttatatatatttatatatatatttatatatttttatatatatttatatatatttttatatatatttatatatatatatatatgagttggccttagttttaagtagttactaggtgtacctttaaaaaaacccatcttccggccgggtgcagtggctcatgcctgtaataccagcactttgggaggccaaggcgagtggatcacctgaggtcaggagtttgagaccagcctggccaacatggcaaaaccctgtctctactacaaatacaaaaattagccaggcatggtggtgggcacctgtaatcccagctactcgggaggctgagagggtaggatcacttgaacctgggaggcggaggttgcagtgagccgagatctcaccactgcactccagcctaggcaactaagcaagactccgcctcaaaaaaaaaagtcttctcaattctttgtgcaaatgctcttatttaaattttcactctaactctgttcactaaaacattactggctttctgaaagttccttacttgatttgaaagtttggcctgccttccactggaagaggggcgctatatttagcacagttcttgaaatgcatttttccaaaatggcagttaagctatgctggaggtgaattggaaatgttgctctgggaagttagtgtcttcaaatggcttagaatgcccaaaggcccctcaggaagttggctgtctgatcaccttcatggctgcccctagctgctgcctgtggatcctgctccgctgccggcctctctgtatccaggcctttgcttctttgccatatatggctggagcatggtgtgggtttttagcttttgaattttattcatttagagcacttaagggttatcctcccctcccttcctgagttaaagatgttttctccattatgttgccatttgctgcttccgtccctactgaccatagagcaccaaccaaaggaatttcatagcagcactccagacagccggggcttgctgcttagctccctttggaacaaattaaaagctacccgttagtgcagcaaatgggggtgcttaattaactaagaatgtggcaccctgagtccactgcattggcatttatagttttcaagtaacaggcaacaaacaagtatttttaatcgtcagctcattaaatatcaaaaatggtatagtagctaaaagcttgggattgtttcttgaagaacagtttacaaagctggtcaacagccttgtaagttgccttatctgttttctcttagtgtgggccctcattctaagcccataaatcagtgtaacaccaagctaggttcttggggtatattacttggcttaataatgcattcatttattcaggcagaaaacttatacttatcaaggactatgtgtcaggcccaggactgtaggcaggggttttgagggctgtcctcctcgactctgtcttcagcctctccttttccaatccaacctatgcccttaacaaaactggagttactaggcctccttgaccatctgttgaatgcattttagtctggtgatcagtgcctaccaataccttgccctgacctgtctgtctgtcttatcttccacaatcctccaaggttctggatgcagaagacagatcactcctaggaaatgcaccacctgtgacctttctccagtcttcctcattatctctttgtaacttgtcctgcagtacaactctcacctgcttattgaggcagtaaccttcttgggaaggatgacctaaacatttctgaggttattgtgtgtcagatgctatgctgagcacttgatatatgtcatctcacacaatgctttccacaaagttttattcaaacactttttttttttctttagagatggagcctcactctttttgcctaggctggagtgaaatggcgcgatcttggctcactgcaacctccacctcccagattcaagcaattctcctgtctcagccttccaagtagctgggattacaggcacccaccaccacgcctggctaattttcgtatttttagtagaggcggggttttaccatgttggccaggctactctcaaactcctgacctcgggtgatccggccgccttggcctcccaaagtgctgggattacaggtgtgagccactgcacccagcctattcatatactttatagctcagggaggttcagaaatttacccagagtcacacagctggaaagctggtggtttagacacacatctgcataactccaaaaccaactgtcttaaccacttttctacttctgggggtcagccccaggtcagcccacagaagcctacatctaggacagtagaatctcaagcggcagctctgatgggtgcatgttctatgcctgcctgaagcttgggttggggagaacacaaggacagggatcagctccgggtgttggggggcagggtggaggaatgacagcacgtgccgtgtgtgtgacatggaggtctattttatccatattgcagctgaaattatatgagtgtatattagctttcagttgcttctataataaattaccaaaaccttagtggcttaaaatgacttacgtttattgtcttattatagttctggaggtcagaattctaaaacggatcttaatgtggccaaaatcaaagtgttggctgcgctggctccttctggaggctgtaggggaggattcattccttgcctttttcagtctccagaggccgcctgctttctgtggctccttagctcctccttcctccatccacaaaaccagtacttaaaatcgatctctctttctctctctcctcattgcattgtcacatgtctttgattctgacccttctgtcttcctcttgtaaagacccttgtggttattgggcccacttggataacccagaatactctccccatctcaggatacttgaacttaattacatctccatagtcccttttgctctgtaaaatagcatactcacaggttctgggaactagaatgtggacacgtttaaggggctatcattctacctatcctgaggtgtaaggaaaatagaagtgcaccatgggctagcctgggataccattgctaaggtggtttctgagggctctagagcagctgaagtattatttgggcgttgagctaaggacagccttatagagcatctgtgatgcatgtgctgagaagctgtgcacttgaggaattccaggaatgaaaggtttttgtttgtttgtttgtttgagatggagttttgttcttgtcacccaggatggagtacgatggcgcgatctcggctcactgcaacctccgcctcccgggttcaagcgattctcccgcctcagcctcccaagtagctgggattacaggtgcccgccattacacccagttaattttttgtatttttagtagagatggggtttcaccatgttggtcaggctggtctcaaactcctgacttcaggtgatccacctgcctcggcctcccaaagtgctgagattacaggtgtgagccaccacgcgcagccaaaaggtctttaaaatgcatgtaagaactaatacctgggatgttttctcctgcttctgagctccatgacccggcgtggatggccacggggtcttatgatctctgattttctgtggaattggaactaccattttgcatctacatccctaaaagtgccatgctactcaaattgtgggaatgaattaccatgttcccctcaagtgagtagcagtcagaccgatgtgtcaggaacacacagtgtgatgcggcaagcagcccaccaggggaggggacctgggtgataggaagagaagaggaggggattctgagaatgcaggcatgcccaaggacattttccgagcagaactgcagtgcccaaagggtttagaaggtgcaagagggagtgactgggaaggtaggcaggtgtcacatcaggaatgatctggagggacagggagccagtgaagggctcaaagcaggggagcgagggcagatatgcacgtggccagagccccttgaggtcaagacctgggtctgcttcatagctgagtgcccagccttgtgagtcttaggccaaggtggaatgctcagcagagagtgaatggatgccacaggtaagcttcactttccttccaggcctgcctcactggacccccctctgaacagttccacacacatcacagagactttatttggagggatttaggttcttgaatgcatggcatagcacacctcactgtcttgggctcctttccacaatgcattggccattgcccaataagtacctgcaaataacatgttgcaataggaataagaggaaacaaacaaacaaatataagggaactggaacaaaaaaaaaagctacatctgacaagtaaggtgattggtcgccagggtccctatgcactagggagcatattgttagatggaatgtgtttcctttttgcgaagtccctcctgtacccggcttcatttgatcttcctcaaaaccacctcctagaggaaagccatgtaaattctttaaaaaaaaaaaaaaaaaaaaagacagttgaggagacccagacccagtggtgtagagcagcggtccccaacctttttagcaccagggactagtttcgtggaagacaatttttccatgcactggggggtcagtaggggatggtttcgggatcagactgttccacctcagatcatcaggcattagttagattctcataaggagcacagagcctagatccctcgtatgcacagttcacaatagggtttgtgctcctataagaatccagtgccactgctgatctgacaggagtcggagctcaggtggtaatgctctcccactgcccacctgctgcgcggcctggctcctaacaggccatggaccaggaccagtccagggcccgggggttggggacccctagagtagagtggtttgccatcgggcatccggtggaggatgggaggattgaggtactaaccttggcttctagattatagttttcttttcctcccatgatgttactctgctttcctcttcattctagcccagttatccttctccttgttaagcttctggaatctgttatcttacccatccttcattcatccttactcaagggctgtcttgtggcatttcatacactgtacttacttatgccaggctctttcacccttgctatatataccttgttttgccatctaaactgggcattcttggagggccagggtgtgatttgaaatttatctgcatgcctaggacataatctacctacccagttaatcttctttgaaataatgaaccccatgttaattcatttcatgagggcggggacagtggctgttttgtttgccagcatagctagcataatgtctggctcctaatagatggggagtgagtttatgtcttgggggcttataagagcacagaacagtgtgatttggggatcttgggctttggtcttgggggattggattgtctcgttcctggtctcctacctggttgtgttactgtggtgtctgccatctgcaggttgagcagcctttagttgcacaaactgtggtcttgtccctaagcagttgtagacactcttaggattttaataagttcacaacactttccaaagtgttttagttcaggtgaggagttctggaatcttgtatatgtggggaagagaggctagaaggaggaaagctggagaaggaaggtgaactatgaagaaggggagcttcagtagattgtgggctggtgtgtcatgtggatttaggttttctgttacttattcctcaccttagagtggggggtgggtggtgtgtccatgtgcccctctctgcccaattgtgctttcccaaggcccatgtatatctgagttcagggatacactttcagtgggtgtgcctggcttcaggataagcagcgtgaagatgcctgtggcatatggatgtcatgtggttgtggctgaaaaccctgggctccatcagaagtgttctccacattttgttttggtgtaacaattacccattaaatgccaggctgcccgcatatggttccctccaacatccttcttgttgagtggaaacttcaggtgtgtggctggaatattttcccatcatttagcatttcagaattaacatattttggagaattctgtgattaatgctgaacggcacatttgcagagtattacagaaacagttaaattggagttggtagatctgtagctgctctttctcatgatgcataagtggtggaaaaggcggggtcaacgggaggattccggggctcactctgtggatgctataattaaagtgggaagtctggcacagttgttagccctggtattgagtgcagatggctgacggccacatcaccaagagtaagagttaggccttttaaagtcttttttctttttcttttatgacccacactatgtattccaagcataggtatggatgcagtgaataattttctcattaaaagtaacagcttattcccatactcattcccagtcttgaaatgagaaaccagtttccttagagttgaggaattgcctatctgtcgtggcttaatagagcttgcggatgagggcgtctggagtagatgaattttataaccaatcagtgctcaaagtggatctaactggaagggctccagctggcagctcttggtctctctcccaattttactgttaatgaattattatttaacccctaaacatagaacagcctgcccttattgttttaggggaagtgagtgctcatgatccctatggcctggcagttaggaatctcctgggctggcgggagtttgacagctgtggggggccatgaagcgggcagaaagagtggtggatgatgtccggggactggcatgaccctgggtctcagcagtgctgcttgcatttggactccatggggctttgtgttggaagagcaaattggcttcactctgcatcatgttctcttgttttcccacagggagtggggccagccagcagaaacagtgggctgtacaacatcaccttcaaatatgacagtaagtaaccgcctttattgctgaagaatggagccctttgagtcatctagagattacatagccatgcttaatcaaggactctgcagtcttggggttgacgaattttctgaacctgttcaggtttgtcaacagctaaagcagctcagtctcaattaggccactcaagtatttgggagcttgaccaggtcaagtgtcttccatagtgttcagaaaagttgtgtaaggagactttccctgtgttccttggggtttatctgcatgtgttgttaaggacatagctgccagtatggcccagcaaggaacacataaacaaagttgccccagtgcagggtgctagggaatggtggacagtatggcaaactggatagctcatgtctagtctgaggggagccttgactccttaattccaaatatggtggccatgaggaattcccactgaaggtagcaaattgatttccaagaatagtgagaaatttgtgctttttgtgtaaacattttttaataatggcagttatttttaaaatttcacacagagtgaatctgtgtgaaattcacacaaggtgaatctgtgtgaaattcacacaaggtgaatctgtgtgaaactgggttccagatgggccagggatctgcagtctgcagttggttggccatcgctgaccaggcctgggcaccaaccgcagtaccccatctatcagttcttttctcttttcttttctttttcttttttgagatagagtctcactctgtcacccaggctggagtgtagtggcgtgatctctgctcactgcaacctccacctcctgggttcaagcgattctcatgcctcagcctcctgagcagctgggattacaggtgcatgccaccacacctagttttgttttttgtttttgtttttgttttttttgagatggagtctcgctctgtcgcccaggctggagtgcagtggcacgatcttggctcactgcaagctccacctcccgggtccgtgccattctcctgcctcagcctcccgagtagctgggactacaggcgcctgccaccacgccaggctaattttttgtatttttagtagagatggggtttcactgtgttagccaggatggtcttgatctcctgaccttgttatcctcctgcctcggcctcccaaagtgctgggattacaggagtgagccaccgcgcccggccacacacccagttagtttttgtatttttagtagagactgggttttgccatgttagccaggctggtcttgaactcctggcctcaagttatctgcccgcctctgcctcccaaagtgctgggattacaggtgtgagccactgtgcctggccccacctatcagttctgtgagctgtggctagtgatttgacttctccaggcttcagttttctcttttaaaataaaacttagtttccttcttctagcatcattttgaggtttaaatgaggtaatgcttataactgctcaacttgggagctgactgcaatgtacattcattaaattgatatctattaatatagaagccagtccaactggagttggaatgcaagcaccacttttttgccctttctctcaaaaaagggtgactctttctgactgaactgttttctaagggcatgtggggggtgctttttctaagcagctcctttcattcataagaaggtagttgtatagaattgtgatcattttagctttatcagccataatttaagtaaaaatgacaagaaggaacttgactcatatttagtgacgtctggcatctgattaatctcttggacagggttatgaatcaatgtaagtaaagggcttaggttgcattgaggcctctcaatgcataatcactgctaaagcaggattgtaaaagttgcggttacaatctaacaattttaagatacaaatatgtgtgtcagattcacacccacagttgctggcatggctattttaggctaaccagtgaggacttacacgtgcaactcagggagctcacattggtggtgtatatatgttctgggtaaatgctgggtagatgctaatgaaagatttgcacatccatgatacttggttcagctaagtaaagacgtggaagggatctttctttgagttacaaagtgaatttctaatatgtgctcttggtcctagcagatcttgtattacattcaagagttcagaattttcccgtcagctgcaaacaaacatttgtatctctaatttaatatggggtttgtgaaggaggatctctccgtgtaaaactttaaagtatcttgctgtttttttaataataccaaatatttggcccacatacctatgcctgtctcttagtcattactttctttttaattcttcaacatttaattaaaatttaattcacagcttgtattgactcctgagacgtttgaagttcagttgcattttgggaaaatgtcatttggacataaattttttgcaaccagaatccaacactttggacttgctagtaattggatccaggctgtgtagaaaaacttattccatattttccattgaaaaagatatttctgtcttccacagggaagttcctgttactgctcagttgactggttactagtcaactgaaataacttgtttgaaataactaagaaacaattactgggttttcaacaaaattactaaaaatcgtatttttctattcctttgtcatttaatgttatacaggaagaaaatgtcttgccattaagtcaaaattaaattttataagtctctctgcctcctttggccttgaattccatgttttttcctttacattctgaggtggtatgcccaagtaggttatattaaattttcttaattcttagactttatattggctgggcacagtggctcatgcctgtaatcccagcactttgggaggccaaagcgggtggatcacctgaggtcaggagttcgagaccaacctaaccaataaggtgaaactctgtctctactaaaaatacaaaaattagctgggcgtggtggcatgtgcctgtagtcccagctactcaggaggctgagacaggagaattgcttgaacccaggaggcggaggttgcagtgagctgagattatgccactgcactccagcctgggtgacagagcgagactctgtctcaaaaaaaaaaaaaaaaaattcttaaactttatattgcataactatatttacagaaacccaaacagtattaattttggcattaggaatgaacaaagaaaacaatgacaacaacaaccattatttgctcttgttcatgcatcttttcagagctgtttgattctctttcattatggaccacaataaatcaaaatatttgaactttacaagtatgacaggatcttgcttttttttttttttttttaatattttgggaagctggtctcagccaggatttttacaggctgaatacctctgattcagaactcatgttggtagcaataagctctgtgctgtgatagaagtggtaagagctgatctctcatagctgcagtttcctcatttgtatagtgaggatgttaaaccagatgttataaattttttcctattctaaaatctcttctttacccagagaacatatgttgattgctttaagagtgaatattcactagaagtagaatttggttttattaacatcctttgaaagaagtaatattgaaatgtaaatatgggccaggcatggtggctcacgcctctaatctcagcaccttgggaggccaaggtgggtggatcacctgaggtcgggagttcgagaccagcctgaccaacatggagaaacctcgtctctactaaaaaatacaaaaattagccgggtgtggtggcgcatgcctgtaatcccagctactcgggaggctgaggcaggagaatcgcttcaactcaggaggcagaggttgccatgagccgagattgcgccattgcactccagcccgggcaacaagagcgaaactctgtctcaaaaaaaaaaaaaaaaaagaaaagaaaaaaagaaatgtaaatatgactgcttttgaagctgacggagttgagtggaggaagggagtgtgcctaatgtagtcaggcaataaagcagaatacaggcagcatgaaggatggagttttacaagtatgggggttgtgttttagtgtgtgtatgttatgctttaatacatttaaaaagaggaatattatgtgcatgttaaaacaaggcttggaagggtattcattagaatgttcattgcacctctgtgtggtaagaggttatgaatgccttttatatttttcttatagtcttttgtggtttttcaatgtctgcaatgaacatttttagtcataaaaatgggaaatgtgcagggagactctacagggagaaaaagggagactcacagagcttcttacaaagtcccctggaatgctttatcccaaataaaaacaccctggcttcagaggggtaatggacaggtttggatgtttgatggaactgatgatcttttgcagcagatactaaaagagagggtgttcaagtctgatcattgagaaagaaatggggatgaagcagcataagaattacaagtggtgcctgctggggatggtgaatggttctccctgcaagagtggccagacagctcatggccattctctgaagtcgcagcctgattctggccggaaggttttggcagctttttaggaaacttgccgattttgaaggtgtatttagcaagaccaggtggtgcagctgctatggctacattgacaggtggcagtgagtaaactcctcaggcaaaatcaaagattggtgtggcttctgttttttgagtaatgtggggtgccttggatttactgggggttgctggtgtctttgatgacacatggtgtctaagaacaaaaattttacctttgaccaatgctagttaacatctttatcacttgtcactgagttagtagcctgtgctaactgggttaagaatcttgctgagaatctctcccctatgaattcacatctgagtgttagttcctttcccccaatcacctggccctctaggttttttctaaaaacaaacaatgcccaagttatttagcgattgttttgtttcatatcactctttaatgctgaaaattggttgaattgatgtaaataattactgatttaggtctaaaaaaagttaatgccaggtacacacacaaactccacactgtataagatcctcccaacattgccctggaatttaacatgggatgagtgggtggtggtggtggtgctacaaatcattcctctgtaacatcttacagttttccaagcagtagtcaacctctcatgtcttattttgggcttttgagggacacatctttaacagaatggatttggccaccttcagacatgccctgtttattttgataagatgaacctgaaaataaaaatgaaattttaaatttaactgttctcattctccctactctctagattgtaccacctacttgaatccagtggggaagcatgtgattgctgacgcccagaatatcaccatcagccagtatgcttgccatgaccaagtggcagtcaccattctttggtccccaggggccctcggtgagtggtcaaaaatcgagtgcatggtgataacctgggtggatagggcccagtgcaaaggtcccacatgatggtctccaggaaccaggcaggtcttgatgtgagtgaggcttatgttggattgggcacagatacactttgttgcatatatttgctgggcgtacacatggcttgaggctgtgccctatggtcttttgtttcttctactgttattgttattcacatgggcttgaaaagtaatattgtgtgagtaataaatggcactgatgtcttggcctctgtctcagccctagtcagcggtgggagggcagcagtgccaagaaagcccatggcccatccaagggcgtaatggccatccagcattagcagtctccgcggacacagagacatgccagcccagcattggcacatgttgtgatttttcaggaaaatcccagtgttcatgaaagacaatgaaatcaattcatttttaaatgttggcaacaaattgaattttttttttttttttgagacatagtttcgctctttcacccaggctggagtgcaatggtgcgatctcggctcactgcaacttccgccttccagtttcaagcgattctcctgcctcagctgcccgagtagctgggattataagtgcccaccaccacacccagctaatttttgtatttttagtagagatggggtttcaccatgttggccaggctggtctcaaactcctgacctcgtgatccgcccgcctcggcctccaaaagtgctgggattacaggcgtgagccactgcgcccagctttaatttttatttaaactgtataagccaaaaaaaccaaatggaaaagaacaaaaaaaaggaggccaagcatggtggcttacacctgtaatctcagcactttgggaggccgagatgggaggatcatttgaggccaggagttcgagactagcctgggcaacaaagtgagacccccccatttctacaaaaagattaaaaaattatccgggcatggtggcacaagtctgtagtcttagctacttggacggccgaggcaggaggatcagttgagcccagcatttgatgctacagttagctatgattatcgtgccactgcactcaagcctgagctatagagtgagagaccctgtctctttataaaacaaaacaggctgggcgtggtggctcatgcctgtaattccagcacttagggaggccgaggcaggtggatcacctgaggtcaggagtttgagactagcctgaccaacatggtgaaaccccgtctccactaaaaatacaaaatcagctgggtgtggtgtcgcatgcctgtaatcccagttacttagggggctgaggcaggagaatcacttgaacccacaaggcagaggttgcggtgagccgagatcgcaccattgcgctccagcctggacaacaagagggaaactctgtctcaaaaataaataaataaataaaaaacaaaagaaaaaactaaaagaaaaaagcaaacctgtattatatggctagattcgggttggggctaaatctgcttgtcctcttgaatgaattgaagatacacaggaaagaatgggttagccaagtgtgagatgtaggaaggggaccatttgttcaggtgggcctgggtttgaacccccagaattgatctttcacatgaggcattgaacctcactgaaccccagcttcccaatctgtagaggggagatgagaactgcctcatggttagagacacacatggtacattttcagagagaactctcaaagaatagtggctgctattaccatgatcagaacctggttctcaggactgccgctttgacactgccacctgatgttacaagtttgtgaaaacctggccaagggagaagtaaagtctgaatttcttaatcggaacaggataaatctcagaagaaccagattgcaggagagggaggataaagcagacccatgggccgaaccacttctccacatcagtacttctgggttttaacctactggggtttccaaaaataatattatcttaacatttaaagattaaaaacattttctgtagataaaaaggaagtggtcattccatgtaaggcttaaatggttaaggggttggcctgacgaattgcaggcccccttgttagaatgaaagtaagagatgtgagctggtgacaggaaaactgaacatcgaccagtaggggcagaagtctgcgcttttcctggatgctgatttatgggtgggggtggctggagagtttctgttaggttctatcaaggacacttcttggaaggtagaaaagcatgtgagttaagagcgctggctgagagccagacacttcctgggttcgaatctcacctctgtcattttattcctgtgtgaccctgggcaagccagttagctactataaacctcagtttcctcatctgtaaaatggggataataacaccttccttctgtggttgttgggaggatttgatgagtttaaatgatgggagagagagcaaataagttctttcctgggaagctgctctataaaattactaatcattacataactacaaggtgttaatagtactgtaatgtgtcacagggataaaggaattacgtttgctgcctcttccctcggcctcagaaccttggtgtagcggtttttaggctaatcttttaaaaataagaacaagaaccaccgcttgccaccccaactgatgaatttttttttctttctttctttttttttttttgagacagagtctcactctgtcgcccaggctggagtgcagtggcatgatctcagctcactgcaagctccgcctcccaggttcacaccattctcctgactcagccttccgagtagctgggactacaggcgcccaccactgtgcccagctgattttttttttgtatttttagcagagacagggtttcaccgtggtctcaatctcctgaccttgtgattcgcccgcctcggccttccaaagtgctgggattacaggcgtgagtcaccgcgcccggccccaacgatgaatttttatgtaattgtgagatgtatggctgttaatggtattaatcacttggctttcgttaactagtcattctgggaatgttgcgtaaattaaatcttagtattaatactaaggatttgttttaaaaagtttttttggatctcaaaaggcaagtcctgcgagatctaaaatagttgttggtctaatgactttgtcatcaccttgtctgaatctctggtggttgctcagctggctttcacccccacaggaagctttgtaattgaaatacagcatggcagagtcgatacctgtgcacagtaatactctgaaaccctaaaatgtgaagctgtaattgttgctcctcttccctactcaccaagaaatatgtattcttcatcaaataattataggattggagaacctatttgaaagagaaaaagattttcctggcctttatcatcaataaatttcccacctggttaattgcatcctgtgtaattacttttgtcctgggaggggaagggttgaaaatgttcagaaggaatgtgaaatcgatatctcgccattgcggcaggctttggggctctccagctgcagctggaccacttcagtctccgtgggatacacaaacccggtgctggcgcttgtgaccgtcagagcttaatccttttgaaagcatctagtcggacgtgcagtggggggagctcaggtggcaggaggctgggctggtgtctttcagcggcgctgtgggtgtctcggggcctcggaggctgtatgaagagcacacactgggcaacccttgggtgtctgcctttcaggcatgattagagcaagaaccgctttgtaaatcacacaggcattcccctaagctatttaatctcaagcctcagaaccccttgggtgcagacacaatttgttgggaattttgtatgttgctcagtgagatgtgccaaaaaatgtagagctaaaacttaaagtggaaacatggttttgggggattccctagtcaacactggaaattatcatcagccaaatgtattctgtgtaatgacctagaaattatatattccacttcagactttttatgaccaattgtaactggagtctaaatatttgaaccctaatgccagagaggcaataggtatttatgaaatagctggctggattagggattaattagtaatggtgggatggagaaaatcacctggtctttaccagaggaatgcagggggtgtgttttttccattctatagactcagataccctggccacagttagaattcctttaactctggtgtgtaggtagagaagatggtaatcttggaggaagaagagtgtgttcagaagtaattaggttcactattaataaaagcattctgctttgcttaggcatcgaattcctgaaaggatttcgggtaatactggaggagctgaagtcggagggaagacagtgccaacaactgattctaaaggatccgaagcagctcaacagtagcttcaaaagaactgtaagtcacactggggaacgtgctcctgaagacatgccattgttccagggtcctgaatagtgtattcaaagtctgaaattggagaaggaggggctatggggtccaccccacccgccaaggtgggcaagaatggtacagcagcaccttgagcctgctccacgctcccagggaaattcttcagcacctccctgtgtaaacatgcctctcgggttactgctggagcagtgatcctggaaggtgtctttgtgctccaaagagtgtatgtgggctcaccctgcgccccaactctgaggttcagtattaacaagccatgggttctttgccaaaaaacagaccgcattgtccatcttcatggttaagcgatccaaatctcaagttagtccagaaactagacctgacttcctgcttccctggaacatgtcctgcagctctggagttgtgtctgggtggcagttggggtaggagcgaagaccttatgaaggtggaggggtgggtaatttctccatgatgtcactgtgtttttgttcccttttagggaatggaatctcaacctttcctgaatatgaaatttgaaacggattatttcgtaaaggttgtcccttttccttccattaaaaacgaaagcaattaccaccctttcttctttagaacccgaggtgagtatggcctttcctgcctggttcccatgagaagacttttctccgcttttaatgatttttctacagaaatgtgttcaagaacgtgccaaggccgggcgcggtggctcacacctctaatcccagcactttgggaggccgaggcaggcagatcacaaggtcaggagttcgagaccagcctggccaacatggtgaaaccctgtctctctaaaaatacaaaaattagccaggcgtggtggcaggcgcctgtaatcccactactcgggaggctaaggcaggagaattgcttgaacctgggagacagaggtttcagtgagccaagattgggccactgcactctagcctgagtgatagagcaagattccatctcagggggaaacaaacaaacaaacaaacaaaaaacatgccaaatactggtatgaaacaagcatggcaaggagaaaagcatccagaaaaacactttttagaattaaggttaggtatagacactgctcatctaaccggatagacccactcctggcttgttctagaacagacctgacagttgatatttttgagggtgctgtgaccaccgctaagacagtctgcattaccaggcacagcacatgcctatgctctcggctatttgggatgctgaggcagcaggatcacttgagcccacgagtttgaggctagcctgggcaacatagcaagaccccatttctagttaaaaaagacagatggccaggcgcggtggctcatgcctgtaatcccaacactttgggaggccaagatgggtgaatcacctgaggtcagtagttcgagaccagcctgaaaaatatggtgaaaccccgtctgtactaaaaatacaaaaattagccgggcgtcatggtgtgcgcctgtagtcccagctactcaggaggctgcgacaggaaaattgcttgaacccaggaggtggaggttgcagtgagctgagatcaagccactgtactccagcctgggtgaaagagcaaacctccatctaaaaaaaaaaaaaaaaaaaaaaaaagccatgtatcaaaacgattagattaaagaaaaaaaattggcctggctcggtggctcatgcctgtaatcctgaggcaggaggattgcttgagcctaggagtttgaggccagcctgggcaacatagcaagaccccatttctagttaaaaaagacagctggcctggggcagtggctcatgcttgtaatcccagcaatttgggaggccgaggcaggcagatcacgaagtcaggagttcgagaccaacctggtcaacatggtccctgtctctactaaaaatacaaaaattagccgggtgtggtggcatgtgcctgtaatctcagcttctcaggaggctgaggcaggagaatcacttgaactcgggaggcggaggttgcagtgagctgagatcatgccgctgcactccagcctgggccacagagcaagactccatctcaaaaagaaaaaaaaaaaaaggaataaaaagtgtaagttgattttgtggtaaaggtaggagcatgaaatgattccatcttttacctgttatcaggagggtggcctgtcattttcaggactagattaagaaaattattttctagaaagttctgtttatttaatgtccatgtgccaggccctgttctaaaggcattccaaatattaactccaaataccctctgtgacaaccctacaaagaatttagtcgtaccatccccacttactagatgccgaatcccacacagagaaggtgaagggcttgccgggagttggatttgaaccccagaagtctgactctggaatccatgctctgaactcaaccacccactgtgctgggtctgttcaccttctgttctgtacaggttatctctttaatcttcctgagttgctgctttcaaactttggtggctggtcgccctggaacaggcagcagctccttcttgccttcctgatcagtctttctgtcattcaaggccttggatggtcagtcctgtccaacatcccctcctgtgaggtctggttgcagccctcatccattgtgatgtttctgttcacaactccagcctacatcaatgtttccctctgcagaattcttattgtggttgttttctacgcagcagttattttaacaattgatttcataattttttttttttttttcgagatggagtttcgctctgtcgcccaggctggagtgcagtggcatgatctcggctcactgcaagctccgcctccggggttcacgccattctcctgactcagcctcctgagtagctgggactacaggtgcccgccaccatgtccagctaatttttttgtatttttagtagaaacggggtttcaccatgttagccaggatggtcttgatctcctgatctcatgatccacccgcctcagcctcccaaagtgctgggattacaggcatgagccaccgcgcccggccctcataattcttaaaataaaattccatacggcaaagaccatgtgtatgtcacatcatctctagatgacttgcacataataaccagatagaagattcaaagaatgtgtttatgaaagcctcacctaaatcaaaattagtgtaatttaagatgaatttttcccgttggcatagaatcaatgtatctttttgggggtaaggtggaggcagggggtgtgttcctggaatgcaaacatttataaccatttcagtgcactgtggttttgatgctgccttcagttttcttggcattatatggagactctccctgggttagcaagcagcatggcacagtggactagctgtttggcctctctcattgtgtttttattgcgtttagattctgtttcaaagctattggctttggtacctggttttcagtgctgacactactacttatatgcctgcatgtaatttcaagaaaccatcaaaagcatcttaaattagaatactagtgaaggttaaaataatcctgcagcagttaccaggaccactccaaagttctcttgtgtctaaacatctccacagtggggtaggggccagcatcatttctgtttacagctgaaacagagcctccatgtgactgtagcatgaacatagctctgctgcccttggctaccagccttgaaattatgtaatgcctgacaagcttttaaaatctgggtgactttacattgttaccatttatgtggcataaagtgaactgcattaatatttttatattataccatttaaattttcataagatacaactgcacagtagtgaaaatcctcattgaattgatgtattttataccttttctagcatcacccggcacagtatctttatatttcattgggttgttgggagaggaaaatgtctaactgtcctaaaactaaaaacatgtatctttattctcttaatagcctgtgacctgttgttacagccggacaatctagcttgtaaaccctgtaagtaatagtgttcttatctatcaagtctcaaagtatcgccactatgatggtgttagggtagcctctggttgctcactctgggtcctaccttcttccagtctggaagcctcggaacctgaacatcagccagcatggctcggacatgcaggtgtccttcgaccatgcaccgcacaacttcggcttccgtttcttctatcttcactacaagctcaagcacgaaggacctttcaagcgaaagacctgtaagcaggtgagctgctgggtgtatataaaggaacactgcgtgtttcaaagcgacccccaggccactggaatttgggttgctcaatgtgagcattaggctttgttggctctcagtggttggtagatacttgagaatgtaatcattgggcatgtctcagggccatcttgccactgtccttcattccctagttatctgtaacccagctgtcctggtggtgatatagcctggtaacagtattgccaaggaataaacaagaagtatttctcatttgttcatatatatgtatgaacaaatatatatatatatatatttttttttttttttttgagatggagtcttgctctgttgcccaggctggagtgcagtggtgtgatcttggctcgctgcagcctccgcctcctgggttcaaacgattctcctgcctcagcctctggagtagctaggattataggcgcatgccaccacacccaactaatttttgtatttttagtagagacggggttcaccatgttgcccaggctggtcttagactcctgacctcaagtgatctacccaccttggcctcccaaagtgctgggattacaggcctgagccaccacacctggcctgtccttttatattttcagcattcatcatgtgctctcttgtgtggcaggccctgagctttatgctccttgaatccataccactctatgaaacagaggctgctgtcatccccattttacagatgagaaagctgaggctcagggatgtcacctggcttgctcaaggccgcacagctagtaagtggaaaaatcagatctaggagccaagccactgataactcagtggctactgattttacaaataggccaaggttaaatagaaactaagtaacccagcctttaaactgggagtggtcagaagagtggaaaccgtttcatggatgttcacaggactgtctgattgcctctgtggataccaagaaagtttttggtcgtggtggcaaagcccagtacctccttagacatgctcctgtgtatgtcaggttctgtcatagtttgctctccttgctggctctcatctctatcaaggtctttgacctcctgctcatgttaaaattatggcaaataaaatatgtataaacacagactggtaatttctttcctcacccttttattaagtaaaggttgttcaaaccagtttctttgtcttcaaatcaaatattcctgctgagggtgccaccagctaagcatagactatggcaagggtcctgggctgtcctgggccttttatcaaagggaagttcagataacatgtggcagataaacacagttgcttttcgatctaatcacattttctgaaaactgtggttgagactggtggcaagtctccttcagctctgggggagaagaggtgtcctgaagacctttgcccaagaagtgagtttttaaagtgttctttggtctgttgcaggagcaaactacagagacgaccagctgcctccttcaaaatgtttctccaggggattatataattgaggtatgcataacacaagaaagccctattaatgctatagaatgaacccagttcatatagaattccaactgtttacaacactaaaatttcaagctattgaaggtgtgcacagttatatttttatatggttcttaacatgcttttaaaaaaagtttatatataattgatttttgatctcttcattaaatatttcaaacaaatatttttatgtaatcatatggtccatatataaccatggtttaaaatctctagtattccttaatactacaaagatatatttttaagattttagcttaaattttttttgttttagtatgaaaacagcaaaataagttatgcccattttgcctatacttctctaagtttctgttgctattcttctatgtatgtataaatgaattctaaacaccacttcaaagaacatgtaaatgtaatgtttcagtgaaaccccgtctcttctaaaaatacaaaaattagctgggcgtggtggtgggcgcctgtaatcccagctactcaggaggctgaggcaggagcatcacttgaaactggaaggtggaggttgcagtgagctgaaattgcgccactgcactccagcctgggtgaaagagtgaaactccctctcaaaaaaaaaagtaatgtttcatttcctttttaagattaccttttcctgtatcaaattggtactacaaataataagagtataaggaaaatagaaaaggaaattaacaatttgtccatagtgccaccattcaaagacaaccaacatgtcttaacattttggtagaaacacctagttcttgcactccttggaagcagtgtgtggtttttgactgatacaccttcttaaagcattaatggaggcccagtaaaatcagtggaaggatgccagtttaattgagcattattagaacgtgggactcaccagctgacttcttcaatgaatacacagccttttgattaataaaagaaaacatgatgaacttagagtttcgagttggtaaagcagagatgaacctgagtacacatgatgcctagtctcagccattcttttccaaaactcagccattctccactgcttgcttcccaccccttcccgcactgcccactgatggaaaagatgaatgaaattaccatttttttccacttacctggtatatatcactttaaaaaaaaataatgcagcatcctctgttttgcagctggtggatgacactaacacaacaagaaaagtgatgcattatgccttaaagccaggtaggtgcttttttgtttgaaatttggctctagactactatagaccaaggtatgtgatactctctgtacttcatgatttacagaaacaaaacaaaatttggctcctctctcttaaatgatgttccatcaaatctgacttttcttccattctaatgtttataacctggaagattaaagccagtttggtgtgtgtagctcggactagataaatagtcaattgtcctctgaagaaaagtggtgggaggggagatttccttaggcaaaattctcactcaaaggtattttatgtcccagcctgactcttaactgttgaattgttctttgcaactctttaaatatgaacctttgaatcctttttaaatcaccaaaccacactagagaaaggtggttgcatggtcctagaacctgttatgcggcttatgtttaaaaagaaaaaaagttgtttctctttgaacctttacactgcttaagtttaaaaactttccctttgaaatttcccagtgcactccccgtgggccgggcccatcagagccgtggccatcacagtgccactggtagtcatatcggcattcgcgacgctcttcactgtgatgtgccgcaagaagcaacaaggtatctctttgtgtgctgtgtctccccacaacaaggggcaggccagggggtgctgccaagagaaagagagactgggagtacctgggtcctccaggatggcgcctgggaagcctcatagctcctactattcagttcccagaattaaaatatttggcttttaacctcaggagccactaaaaaaaacaggtatcattatatatctgtttcttgggacagggtctcgctctgttgcccaggctagagtgcagtggcacagtcatagctcactgcaggctcgacttcccaggcttaggccatcctcccacttcagccccctgaggtagctggggactacaggcatgcaccaccatgcctggctaattttaaaaaaaaattttttttgtagtcatggggtctcactatgttgcctaggctggtcttgaactcctaagctcaagcattcctcctgcctcagcctccctctcatgctgggattacaggcatgagacactgcatctggcccataattctattttcaatgataggagagtaaattcagggtcataaaggaagcctgaagtataagtaaggatataggtagggcttggtcatttacaaaagtcaccatgagacagccttctgaggagttggaaatgatccatagcttggtctgggtgaggattacacagttatatacttccataaaaattcactgagatgtacacttaagatttatgtactttacttttgtaaattttacatcgataaaaacttttaaaaaaaatcagctctgcctgtgcttaattggtctactaggtgcacttggctgcaagagccagttctgggcactctgctaactaaggtagcgctctgctaaccagggtgacccctgcagcatttcttagtttatccaagatcaatttcaggtaaagaacaatttttgaccattcgttgctccactgcggaaatcagctgtcccattccaagtgatgatcagagggggctgatggagttggggaatgggactgctctaggtagacgtgttctttcttgaagatagcactgggtttcaattcttaggaaatagaacaaagcgttgcttgcaagtatcaaccttatcttcttttccaatttagaaaatatatattcacatttagatgaagagagctctgagtcttccacatacactgcagcactcccaagagagaggctccggccgcggccgaaggtctttctctgctattccagtaaagatggccagaatcacatgaatgtcgtccagtgtttcgcctacttcctccaggacttctgtggctgtgaggtgcggaatctaaagttccttctcctaccctggccaggacacttgccctgtactctctccccgctgccttctcctctcttctgggcctcctgtggtgacacctgcccttgactagtgccacagctttcaaactggggatagtctcgcactcttttttcagtctgtcttacccatcaccagcactaaatatttcataatacttagttctaactctgacaaactcctgctctaaagctttgagtggcacccacctggcaggaagttttgtaagcattaagaagaccagtagcttccgtggaaacatgcaattggagttgaggggtgtcactcatgacatcctagtgagcatgttcaggacagaagccccacttggagagtcaaagagagagtggcaagtaaagcagtgagttcgcacaattgtttggaggagttctgctgagaaggggaatgaaggacggggctgccattagaggggatcttgaggtccagggagaagtgataaacgaagggctctgtgaagctgtttgaccattgactggtggaatcatagacagggagaaactcatgatgcaggagacggcactggccagagagaacagggaggtaggaagggagcactcccagaaaacaatattttgtcaagcactgaaatgatctgctctggtttcttagctgttctcttgagttattaatatcttattaatatgcttttctataatgtcagaatgtacatttttagagtgaagtctgaaactctcatgcaagacataccctgtttcttgaaaatgcaagaactgtacaataactgtgtgattggaagttgtttttgctttgaaactgcccattggcatgtttttcagaatctctccatgtggtgaggctgccccctagtgtcaacataacatactacgctagcctagtttccctctgcatgaaagcgtgaggttggtggatcagcacgtgctgaaaaataactacactctagccaatggcacacagttttcagataccacgggcaaccaagtttgctctacttcacaagtatttagcctctggggaaaacgctcttccagttattagtgtaatagttattgtagaaaatttggaactagaaaaggatgataaataaaacattgtctggaatcccaaactgattaaggaaaatcttagaaagaggaactcatatttcatgtgtggtttatttccttccagtctttttccatataggtgaactcacacgtacagttttgcctttggggctgattgaaatgattttttgcagtctcttaataattttttacactattagtagttatatgtcaactgcaattttaaatagctacatgatcctccatattgatttgccataactgagttaatacaaatattaaacatctcagtggttcaatattgtcccatttgtgatgatttcccaagaaagatgcctggaaatggaattgctgggtcaaagatagaaacatttaaaaaatgcttggtatatactcccactgagcttttagcatgtgtaatgttaacaagaattaaggaaagtataagacaattcagggttattttcagcaagtggatggatgttggggctttttccccattggtaacatcttagagcagaagaggagaacaaagtcgtttcagaatgcccttccctgtaagatagtgtggctgctgtgtttcgtcatagccattgggaattaataactacagaaggaaagacatcaacacaataaccaagagatgtttctggtagaattaggtaaaagtggtctgagaaggtgaagtcctctaaggggccacacatgtctgatttttctctcctttgtcagccacgcccacagtctctctaccagaccgcctttgggggtaaagctttgtcaattaccagccttgtagagatgtagccttgtatacctgtgtgaagccatagaggaaggtgctagccagtcctgagtgagttactcagaatgaccatgttaatgcagttcactagcctcctctccagccatggaccaactagtaaacaacataggtgagcctgaggctatgagagtgtcgagataggtcccctttgtcagtcactgtctggatgtgagtcacctataattgtgggtgactggcatccaggcctgagccccatctcccagctcactttggagtcactcatccacatcctcctctcagagcctgccagccttctctccagaatctgcccctccaatctaggcacctcactcaccagatcaaccaacctcagtttctctgtcctgtgctctctaccacctgttgcttccttgaggatatcctatgtagggtgtgacttgggcaaggtgccaaaagcactgcgcttctgtcccctcacttgtagggcaggagtggtaatgactccatgtgatacaaaaatggatggatggcaagtttttgcagagggactagggtgtgaccatcacccacggaactttagctgttccttggtatggtgtaacctggagcctgcacatagctgtgctaataagggttaaggggcagatgagatggcctccttctgacatttcccttcctgttactcacttcccgagcctcttcccgagccttctgtatgggtgaggtgccttgttctctttccaggtggctctggacctgtgggaagacttcagcctctgtagagaagggcagagagaatgggtcatccagaagatccacgagtcccagttcatcattgtggtttgttccaaaggtatgaagtactttgtggacaagaagaactacaaacacaaaggaggtggccgaggctcggggaaaggagagctcttcctggtggcggtgtcagccattgccgaaaagctccgccaggccaagcagagttcgtccgcggcgctcagcaagtttatcgccgtctactttgattattcctgcgagggagacgtccccggtatcctagacctgagtaccaagtacagactcatggacaatcttcctcagctctgttcccacttgcactcccgagaccacggcctccaggagccggggcagcacacgcgacagggcagcagaaggaactacttccggagcaagtcaggccggtccctatacgtcgccatttgcaacatgcaccagtttattgacgaggagcccgactggttcgaaaagcagttcgttcccttccatcctcctccactgcgctaccgggagccagtcttggagaaatttgattcgggcttggttttaaatgatgtcatgtgcaaaccagggcctgagagtgacttctgcctaaaggtagaggcggctgttcttggggcaaccggaccagccgactcccagcacgagagtcagcatgggggcctggaccaagacggggaggcccggcctgcccttgacggtagcgccgccctgcaacccctgctgcacacggtgaaagccggcagcccctcggacatgccgcgggactcaggcatctatgactcgtctgtgccctcatccgagctgtctctgccactgatggaaggactctcgacggaccagacagaaacgtcttccctgacggagagcgtgtcctcctcttcaggcctgggtaaggtgcctttggggccgggtcctaacaggccgcagcctttgaccatgcttctgaaatcagtcaaagcgtttttccacttttggtgccaacttattgggcaatgaaacctgatgagaacacagctcgtttggtagtcttgatttataccaggtgatgggagtactcacatgtttgagttgcagaaatactaatgctaaattatagtgagctgcccagaccctgcaaggggtgttgtgccacatacagactatgcactgtatcacttttctaaactccaaaaacatcagacacgaaaacacattgggccccaagggtcttgggtaacagtttgtggatgcgtcttttttagacctgtaatgttcacaccccccgcccccattgtctttaaagctacattcattgagtctgggattcatgggtacagtattctttctatccttcagcatagggtcccaggtatgagggctctctaggaaggcctacttctgcagggagcatcaggtagatgccatctcaggctgtcccttaccatgtctgtaactagttggagtcatgcatacaaacccttgactttttttttttttttttgagatggagtctcaccctgtcgcccaggctgcaatggcatgatctcagctcactgcaacctctgcctcctgggttcaagcgattcttctgcccagcctcccgaatagctgggattacaagcatgcgccaccatgcccagctaaatttttgtatctttagtagagattgggtttcaccatgttggccaggctggtctcaaactcctgacctcaagtgatccctcaacctcggcctcccaaagtgctgggattacaggcgtgagccactgcgcccggcctaaacgcttgacttttaagaaatatctcttccttcctcaactaagggaactagaacctgttaggaggatgagagtgccccatcttgagttggttgggattcttgcctcgtttatacagagcccatagtccaaacccagatccagtcacattctgccatgagcacctgcccagcccagtgaaatgcaatgacagtgtgactctgtactctcttctctccttaggtgaggaggaacctcctgcccttccttccaagctcctctcttctgggtcatgcaaagcagatcttggttgccgcagctacactgatgaactccacgcggtcgcccctttgtaacaaaacgaaagagtctaagcattgccactttagctgctgcctccctctgattccccagctcatctccctggttgcatggcccacttggagctgaggtctcatacaaggatatttggagtgaaatgctggccagtacttgttctcccttgccccaaccctttaccggatatcttgacaaactctccaattttctaaaatgatatggagctctgaaaggcatgtccataaggtctgacaacagcttgccaaatttggttagtccttggatcagagcctgttgtgggaggtagggaggaaatatgtaaagaaaaacaggaagatacctgcactaatcattcagacttcattgagctctgcaaactttgcctgtttgctattggctaccttgatttgaaatgctttgtgaaaaaaggcacttttaacatcatagccacagaaatcaagtgccagtctatctggaatccatgttgtattgcagataatgttctcatttatttttgatgtagaatttacattgccatgggtgttaaataagctttgagtcaaaagtcaagaaagtgactgaatatacagtcaccttttatgaaatgagtctctgtgttactgggtggcatgactgattgaggtgaagctcacggggccaggctgaccgtcttgaccgttccacttgagataggttggtcatcgtgcagaaggccccaggacctcagcacacacagcctcctcttggtctgagtaggcatcatgtgggggccagatctgcctgctgtttccatgggttacatttactgtgctgtatctcagatgttggtgtctggaagtttattcttaagagactgctacccagctggtctgtattattggaagttgcagttcgtgctttggttggccttctggtctaaagctgtgtcctgaatattagggatcacaattcactgaaatacagcagtgtgtggaggtgatggccagttaatctgctgaactggttttgactaatgacaaacctctttttaagatggtagaatggaggtgatagtcacaaaagtaaatgttccatttttatgaatgactttctacagagtttctatttctaaagaaaaaacaattgttcacatcccatctgatgattagcatgtgtgtaatgaatgctgtcttggtctcccctgtggaaacccttctccctgtgccttagagcaggtgtgtacatctctcactacctttctcatgggtgctgttagattttggcacccgttttctcagcattcagcccagggaatgtggttttcacttcttcgtcagataagaccaacatgaaggggtatgttgagaaacatcctgaggcaaggtgggaggtgggatggggcaggactttcccttccaagcacatgcatggcaggtggggaaaggggggcttgcacccctgctggaaagaaaaggtttgtgtatatttctgatgcaaatgtcatactcactgctctgtaaaggcagctggcagctttttgggaaaagaacgtgctcgtctgttctctggcatcaagtttcttgcagctgctctgagggagagacagtgagctgcaagactgcctccccataacaacaggcaactcagagaagagtcattttatgttgttcctatggaatctggaatgagtgcagagctcctacccacacatgactgccccgccatttcatcctaggcattctgtgaaggagattggttagtccaaacttgctaacatacgaaaattcacttggaacatgatgagagatttcttattgaggccaagagatgtttcctgtcccagaggaaccattaggagtcgcttttagggtattcagctttgttcatgaaataaggcatctctgagaaagtggccccagggagagaatggaggactgggaggagaagcattaactgagctccaagggtgtgtgggcagagagcttgctatgtgaactcactccttaagaaaatggaagagaaaaagagagtgctagttaaaaaatcgggatgttttagtttggatttagggttttgatacttatgttgaaatactaatgtttctgatcaataaaatcaaactcttaatataccgagtaatgaaaccatagtgtgattgcctcagaataaattgagaagtccaacttcctagttttgtttaattagtttcactttttctactctccccagtatgctagaaatgggaatcgttgccctgcagattacggcaaaacatctgttttaagcaaagctgcattttttgactcagaaattgtcccagacggtggatataagatgaaattcagaaaaacgttctgccaagtcacaggcttttagatattatggaaacaagaaatggaaaacaggatgatctccatgagaggccttgatcctgagagtaaaaggcttgtgtagataggttagacaacgtcctctagaaaagagaccagggataagtccaggtttccaggaaaaccaagaagcctgcgggtagctgaaggtagagtgctagttgttcatcttaacttaccaatgagctacagaaaggacttagcatctgatgtcatcagctttgccaggagagtgatcaaggaggttaaagctcaggtaaaggtgtgccttctcagagattggctacaagcaacagagaccacctcaacagagaccacctcaacagactcagcccagccatacaaggtgccaaagctcctccagagggctgtcttgggcctttgaggcaattgatctccagaaagagtcagaagtcattccagtccaggcccaggtattcagatggtgacccagccagataatagtatcttgagcaaataatagtatcttgagtgcaaataagcaggaagactgtccttcaaaaaatgtggggttacatgattttcagagcctttttttcagagttgagcatcttttcttttaaaagaaataaggggcaagaggaccaattttattccttgaggaaaaatgacacacccttctcccaaaagaaagaaaactctctggccccccaacttcaacactaatttggctccctgaagaagagagaaaatattatttctgtctttattgaagagaaatgggcaatgccaatgtgaaggttactagtcttttttattttctattggtgaagactactactgctcttatttagcagatcttataccttcagtggtcaccagtatagcaggtgaggtataaggaaaacagcagtgtgatgataaatggtaattaatatactttgtctgtgtcagcaatagggaatggtggggactgtggcaaactgaagcgcccctgttccacccacagtgggtaattttccagtcgactgtggccatgaagtacttcctgatcttcccatttttcaagaaaagctgacaatctggatttttatatgaaaaattctgattttaaaaaatattggcaactaagttaaaattcaagtgaatttagacccagcagaagacatggatggacctgatttggtccactgactaccagtttgttaacctgtgctttataagatttgaaggaaaggcattcatggtaattacagacggtgccaccagaaaatgctcttgctaaatgcagccagtagttagattgcttctttctccagtctcccccgcaaagaaatttgacgtgattctgaatgcactggacatgtcttgattgcgtctttacatttcacagtgtcttaaaagaaaggcaagccagttgttaatttcagaatcagatttatgctctctcaatttaaaaaatgctgggaacaatttcatttttttttttttgagatggagtcttgctctgttgcccaggctggagtgcagtggcgtgatctcggctcactgcaagctccacctcccgggttcacgccattctcctgcctcagcctcctgagtagctgggactacaggcgcccaccaccacgcctggctaatttttttgtatttttagtagagacggggtttcactgtgttagccaggatgatctcgatctcctgacctggtgatccgcttgcctcggcctcccaaagtgctgggattacaggcgtgagccactgcgcccggcctaacaatttcatttaaactccacaacctaaagggctttgtttatagttttagctcttggcataatttttttcaggtggtgtgcaattctgagcataggccaagacatgattaggaaagcaggcagttgtagagagtaaggcaaggaacctcctagcgtccattagagccaggtatttgcattatcttccgttttaagtggtctgtgaattgactgtgttttggaggtgtgaaacagtatacagagaaaagcttttcctgatactgagatatcagttaggagtccaaatggggtgttgggtcatccttgccatatcacctcctttccaggctcagagtgaaaatagacaaaaggaaatctgactgcaagccagtggctttgattccagtttcagagtttagggactaggagagagtttagattatctagcatattctccccctggtgtcagacagggctgtgcctgaattattccagacatatggctgtagatggtattctttattttataagaaggagattctgtaacctaccctgctgatcagatagttctttgtatgtcttagagaaattcaagccagcttccttttgttcggcttgtagtggagaaagaacagctggtcaccttccatgtattcaaaaaccacagtgaagtcatccccctggtgtttttatttcagtgataaataattccacccacttaaaccattcttcatggctcttgttttccaggggcctaataattttcactgctgtaatgtttctcagcttcacacttagtttagttgcccaaacaatgttggtgccttactcacattggtgccttgtgaagacgaggctcaggatggggattatggggaaattcttgcacacccagctcctcttaccacttaaaaatataatggcactttcacaaaatgatatgtcacctatattcattgagaattatttgactgccacatttttcccctgatgatagtcatctatcataacttgtgtttgttttcctcctgagatcaaacacttggtgcttattcctgatgtatactctgagaccagctcttaccttctgagtggcagctacccctccctcccaattttagatcctatttttacacatctctatagatatcacctttatttcatgactcacaatattaaatggtacagacttcagtttaaccactggtgtggtaacagcagtagttgctaagtaccaccttcccattgctgtttgagggctaatttgcaaagacatttgaatctcccagtgaagatgtctggggaattttggccagttgtcttccctcttgcccttttgttctttaaaattcagcttggaccatagacacctccaggatcttgtttatgttctgctctcaattgaccaagcactgcgttttgcacaatcagaagtctcacaaaagcaaacagttatgactgcatatctgatgtttatatcctataaaatttcaggaagattcagagtcaatcttctatttgtacatgatgtagacaaaattagctgctccaattgttagacaaaaaattgccattggattacactaatgtgctcatctgttgttttaaaagtttggtatcaggcggggcacggtggctcacgcctgtaatcccagcattttgggaggccaaggtgggcggatcacctgaggtccagagttcaagaccagcctgaccaacatggtgaaaccctgtctctactaaaaatacaaaattaatcaggcgtggttgtgtgtgcctgtaatcccagctactcgagaggctgaggcaggagaatcgcttgaatccgggaggcagaggttgcagtgagctgagatcacgccattgcactctagcctgggcaacaagagcgaaactccgtctcaacaacaacaacaaaaagtttggtatgtttctctcaagaaaaaagcatggtgagtccagacagcagcaaaagcttttgtgaaaaccaattgtgttcatctagatagtaagtaactcctatttttactgttaattttttaaaagagaatttttccctgtggaaactccctgttagtacgtcctaggggagaaagcctgtggaatatggtggttattgatggcgttgcctttgtttcatctttgagtttgccctttgtgggatctagtgggataatgagcactgacagaactcttaacagcgtgctgtatttttgacattgaaaatgttaatgacttgatttgtacataactctgtaactaggtgaaagtagatcacagctgacatttacaaaatgtttttgtaccttagaatttctgcattaaataaaatgttttgttttaa

SEQ ID NO: 392 - DNA, 341453 bp, Homo sapiens
ttttgcggtttgggagggaggctgcgaggaggggcgcggtgcccgccgccgccaccgcagcaccgcacagcgtctctcctgggggtgcgacctacgccggggacccagcgctcgggcaccggaggccggcctcgcaccggtgcggaggccggctctcgcgaggtgaggaggaaacgcaggaggaagaggagaaggagaaggaggagaaggaggagggccggagctgcccccgcccagccggagcccggcaggagcgcgaggaaaacctactccccccgccccgcgccgctctccccgccctctcccacgccttccgctttcacctagggctgtaggtgcggcgcggaggctgggcgggagctacgccggcccaagccccgccggggaccagcgagccgggaggaggagcaggcgccacagccgccccgcgccccgcgcccgcttgtaatccggtccgctccttattcagccgccgggaactgcgaggaggcgtcatgtagcagcagcagcaaatccgcctcgcatttgcaactcttttttttttttttggtggggcggggggcgcgcggcaaaattctgtctccgcccccccttttcttgcccacttccatttgcaagctgcatctgcctctctaaaaaaattgaggagttcggggaagggcagggggccataaatcagagttggacctgcaataacccccacacctacagggcaaccatgaccgaggagagctctgacgttcccagggagttgataggtaagattcacgcggttgttggttttccaccttcctctgcgtactcctcacctctctctcccttcccacctctgctttcccgcaggtctcgagaagtcttggcgccccttagggcagagtggtgttgggcagggtcactgggggtgccgggaagtttgttcccatccgaccgcctgtagagccaagtgcagagagggaaggcttcggggaggaatcgggagtcctcgggaggtgggtgggaggagggtctcgactgtgagccctgggcacctcctcttgcccggaagcggggatccaggttggcgaaagaagggggcgggccatcttagacttgggagttctgcaagcgaggggagccctttacagctcccagcccactgccccaaactcgggaaagtccgggaaagcctattggaaggacaggtggcgagcgcacagtaggtcgtctccggcacgtgtcaggcgctttcctgaaaatgccccgcgggaggtgatcttctgacacgcagacttgggggagtgggcgctagtctggtaaaatgactgggcttggcaaggtgtggcttggtgtagccagctgggagcgaaagggttacagggctgacgcagactcaggccaggaaatagagggttaatgataaaagccttattttaataatgattaacctaccgattctccctataggggatctcttagggaacccgtgtgtgttacgctgtgcaaggtgacccattgtttgagtaccttgaggtttttttttttttggtggtggtgggggcggggctggttaagtcttggggtttaacttaattatctggagggttaaaatggcagagctgaaataggatgggagagtgttctgaaaacctagcgtttaagcatgtatatgtgtgtagcatgttatactgtaacaaggtatgtgcgtctgtgtacagatgtgttttgagccctagtgacctatattccctcctgtaccattcttggcacactacacagcctacagctcacaaagatgatgtttaatcggcgctgacaacaagaggaagttctgagcacccgttgatctccatgtgtggaatttgcccctctgttgtttcttttagctaataatactttggaggaatttgtgtatgcccttccgttggtgactgttaactcagcaggtaaaacttgatgtagagaggctgttgctaggtttgtatggaagcccctacttctgctgaattacagacaaacctgatcttttaccagaatttacagtatgaaattattcacagacgcacgcgcgtgtgcgcgcgcgcacacacacacacacacacacacacacacacacgcacctctcatcatgatcccagcagatcctcttctctctccccaaccctgtggagtctgcatcttttgctggagtgagtgacacatccggttctgggaggctgcgacctttccaacaccccaagcaaacgccagaggctctgaagacgcctccagaggtcctgagaatgagtgtagggcagggcttgcctggctggtcaggggataaggatggctaaagtgggtggcagatttttactttatataaggagttgtccttaagtctggaaatggaaagtgtaggtaattacttaggcccaagagaaagagtgaagggtagagtggaaataaggtgtctgggtttctattcatggttctcaaaaggaatagtttgtatattttaaaagttgagtttgacctttatcttgaaatggaatttttgtttttattaagtattgcctatctctttcaagagagtgacatattatgcccgatatgatttttctgggcctttcagtggtcaagttaggctgggatagaataaatacctgcacctgctttcctctaaattcaagtgctcacaagagttctgctctgatcaattcaaaatggcgaccgaccacatgaaaacctctatatattcccttaagattccctcaagatatttaaaaagtgttacagacttggctgagcgtggtggctcacccctgtaatcctagcactttgggaggccgaggcaggtggatcacctgaggtcgggagttggagaccagcctgaccaacatgaagaaacccggtctctactaaaaatacaaaaattagctgggcgtgggggcacgtggctgtaatcccagctactcgggaggctgaggcaggagaatcacttgaacccgggaggcggaggttgccgtaagccgagatcaagccatttcattccagcctgggcaataagagtgaaactccatctcaaaaaaaaaaaaaaaaaaaaaaagtgttatagactttatgtagaaacaatttaaatgtagagaagaataagaagactatatgtcactcctgttaccacttagaggtagttattttaaagggtatatgattttccagtctgtttccatgtgtatatgttcttaagtcaatttcagatgcccatttcccgcaattcttttttaggggagggaggagtggcctgtgcttgtttctcgagttctgataagataggagctttgtgaagaactcatagtgcagtgagctcttctacatgttcccttgccccaaacattccacctccttgctgttccttgaacaggctgtgctttctcagatttccatgctgttctttatgcgtacactgtctttttctccccgttttcactctttatctcagcagctctaaactttcatggcggtatttccaagaagaaaattttgattaccccttattaaacatatatttgttaaactacatgctccatttagtgtgtataatctaaaacacaaactgaaacacacattgtaagtagaaatgaaaattctattttcttctttcatctcaatggattatattgtacactctactttggaaaccagtgatcttatttcctatgccttcaagattcagctcagggatcctctcctccctgaaacctttgcgtgcttccgaatccatgatcttatgcattgtgtgtgaatttcttttatgacatctctcagtgacctccactagattgcaaactcctgtgaaatgcaaagaccatctctatctagcacctagtagagtacctgacatacaagaggtactcctatgtacatttatttgttgaacatgtgaatagaccaaaatgattataatacagaatacagaggtatgggagcatagaggaggggactgtattttggaggataagtagaatataaccaggaggacaatagggaaagggcatcccaggaaagagaataatagatacacaatcctaggggtgtaaaagatgaagatattaggaataattggatgtttaggtatgtgctgagaagtcacactgaaaataaatgtgaaagaccttgaatggcatgccatgagttttgggtttattcaaaaatgactgcaactcgtagactgggagggacgtgatgaatctcacagttttggaagagtcactgtggttatggaggtgacagtgggctgatgggttagaggccatggacttagtcttggtgagagattctgaggcccttactgcagtcatgcctaggtagtcaggagccgtggaggaggtagattttaggagactgactttctgtctgagagaaaggagttggacataagcattttccagcaacattagtgtccagagtaggagataatgagtttgatttcagacgtattcattttgaggtactcatgggagccctaggaagacttttccaccaccatctgaaatgtgaagtctccagatttctccttctattgcctttgaccacttcttgggggtattgtgctgtcatgattttggaaggacagatggctgggagtgcctttgtttgagtaaatcatctggtatagttctggcttatttttatttttttgagacagagtctcactgtgtcactcaggctggaatgcagtggcacgatctcagctccactgcaacctccacctctcggtttcaagcaattctcgtgcttcagcccctggactaactgagattacaggcacgcaccaccacacctggctaatttttttttgtatttttagtagaggcagggtttatccatgttggccaggctggtcttgaactcctggcctcaagcgatccaccttcctcagcctcccaaagtgctgggattacagacgtgagccaacgtgcccagcccggttctgttctgttttgttttgccgtattccccaaacatcatgtcaagacttactcatagagaatgctaatatttgtatgacactatggtgaacccagaggctgctgggcaccagaggtaaccagccaggggcagagggaatttatgaattcctgttgtgttctgcatgcaacgtagtgtttcatcatactgcccaacttcactgtttgctgttctttgttttttcttttatatgtatcttattttccaaacaagattatgtcatgccttgcatgggctggtattatgtcgtgcttttgtgtttgcctcagcatatcaatatacagtacgaggtacaaagtaggtgtttattaaatacttgatgggtgataaccatccaacttgttaaaacaagtaaaaaaagacaaacggtcgggcacggtggctcatgcctgtaatcccggcactttgggaggccaaggcaggcggatcacttgaggtcaggagttcaagaccagcctgaccaacatggtaaaaccccatctctactaaatacaaaaaattagccggacctggtggtgtgcgcctgtagtctcagctgttcgggaagctgaggcaggagaatcacttgaacccaggaggcggaggttgcagtgagccaagatctcaccactgcactccagcctgggtgacagagtaagactctgtctcaaaagacaacaacagtaaaaacaaccaaatatactcctccaaatgcttactcctcctcagtgctttttttcttattaataacataattccttttttttttcagaaagcataaaggatgttattggcagaaagataaaaatttcagtgaagaagaaagtaaagttggaagttaagggagacaaagttgaaaacaaagtgctggtaagtattgctgtttatttttattaaatgtttggaaatgaaagtgtgttttcattgtttagattgcttaattttcatgcagcattacttctgtgttttatatattgttcaaaagttctgatgaccattttgtcttaggttaattggaatatttctttgtcaaaagttaaaaatagggtaatttgaattttaaagatcaaaggcttttagattgtatttctcaaagttgtaattgctgcctatatttaggtaatctcttagagcctgttttcataatattcagagtttgatgttaaatggaacttttttatttggtgtgtggtgggtgatcctatgactttattcataaagtcttatggaggagtttaaaaagttcatctcatgttggtttaattacttaattagattttctcagatgttatatatgagtccatctaaggggtgatgagctaacaaaacattgtcattttacttagggtgttggtgctttggagggaaactcctgctgaaggcagtatctgctagtgttgcgactggacttggggttccttctagtttgtgagaggagatgctgagggattgggccctgctgcagaaaacttcttagagaggtgtcagtgacagagttgtacctttagagaggtgaaaacattttgtgatattttaatggtttctaggttgagattgtggcaaatctaaatttaagcttaggtggaaagaatattttgatggagagaatactgtttaactttttatcatggatattttcaaacatatgcaaaaagcagataatagtatatcgaactctgtgtacctgtccttcccagcttcaaccattttcagcattgtactaatattaaatatcttccccatggtgtttgtttgttgttgctgttttttttttcctctggagaattttaaaacaaatcccaggtatgttattgaaagagtataatttcttaattttttaaagtctttttgagacaggatttcagtctgttgcccaggctggagtgcaatggtgtgatcttggctcattgtagcctcaacctcccaggctcaagcgatcctcccacctcagcctcctgagtagctgggactacaggtgtgagccatcatgcccagctaattttgtttattttttgtagagacagggtctccctgtattcccgaggctggtctcaaactcctggactcaagcgatctgcctgcctcggcctcccgaagtgctgggattacaggcatgagccactgtgcgtggcctgaaaaagaatatttttaatattccattgcttcagttaaagttgccaaagaatttgaagtgtctttctgatcacatctgtcttgagaatcttctaaaatatctaactccaggatatgtgattgtcttttcttgttagtaaggattatgcttgtgatggatgacttctgtttctatgttgtctatatatacaagtcgggatggtaaaggcattgaatgggaaaacttgaatggcttttgcccagcaacaaaatgtgcttatgtaaactgcatgattaagttatcagtagaagaaatgattggtgccattgttctgttgtatttaacttcagtaaaggtgagatttccttaagttatgtttttcttgatgttgttcaacaatgattgtgctattttttggaagtggtagtgtagagaagaaatattgtttctgtcatttgcttttttacaaatttaaagtaagtttttaataatgtagtaactttataagatgaatcaacttctctacaacttaaatataaggtagtggttgctatgacagtctaaaaaattggggcttggtattatttgatatggaaattattattatgctaagaacaaacccacatcatgagtgcaatttaccatgttaaaatttcaaagacaaatttaaatgtccagtataaaattagcactatttaaacatgcttatgattagtacttaattgtaagtttttttggcctcatctaacagctggaattgattaaagttgtaaccaaattaaaaatgtatttgagtttaagcatttatctccccaaatatggaatctaagcagtttctagaagcatggccggaactcattgtggctgttacttacttgcatgggcaggaattattaatagaaatactcaaggtctggctttctttgacaggcttcaagttagaacaagaagatgtatgaagtaacctcaaagttgtggatttctgagtttctgagtttagagaaatttaattgcttaatccattgttagcctactaaaatggttcataaatgagttggctgaatatctacagtacgctttttgagttgtgcttttgttacttcccccattgcccaccattcactccttttcttcttataaaagtaggagtgtgctgtattttacgtggttctttcttcttacacttgagactttatactatttctagcttatcttttgtagagggcttatcttcatcttcctataatcataatagctaatatttctaaaaatctgtttttgaagtctagtcaagtgaagcaatgggattggaggaagagcaaagaaatctataatgagttgtgatcaattagttgtaaacacccctacactcagaccagccatgatcataatagctaatatttattaaacactggccaagtgccagagactgtgctgagtacttaattacgcattgccttgttatatccccactacaacgctatgaggtaggcactttttacatctccattttacagatgaggaaattgagatttggcgaggccaaagtaaattgcttcacatcatttggctagttaataacagctgggattcgaacccagctctgcctcactcagagcctatctgctttgcctttgtggtcaaaaagaaggcagctgttactttgttccatggttgctgacttcaaacaatgataggggagatttggactttagagtctctctgtctttgattgattgatttatacactagttttatatttattgagaacctgctgtgtcccaggcacatggtgtatacaaaatagtcctagtctttgacttcatgggactcgaagcttacagtctagttggggaggtaaacatgtagccaggcagtggtttcagatgtgctatgagtggatgaatcggggcttcaggagcacggagaggaactcccaactcaggcctgagaatcagggaagacttcagaaggaagataagcttaagctggcgttcactggatgagtaggagttagccaagcgaagagagtggagacatgttctggacaaagggaacagaatacgtctggaagcctgagagagcttatgttagagaaacatactaaggtacagctggggtaaggcatatacagggtagagaatgggcaggtgtaaagcctgagtcctgtccttgcagttgggatgtcaggtgaaagttaggactggttaaacaggtctcttcttgccacctgtgtataatgaaatattaaggctcagtggttaagggcccagattttgggttcacactgttgctcagtaactttgtgacaatgttaagaatcaggttttttttttttttttttccgtatggaaaaaatcttatgttataacagtatctattggtatgtggttgctttgcatatcaagtggaatttatttaaatactgcatagcacagtggctgcatgcagcaaacacccaaaaaatgataaggcaagaggaacaaaggggtcctgcattctgttttctccgtggtgcggaaagtgccattccttctgaagcccaagtatctgctgcctccattgacaggttgaggtcagttcaccataaggccaagagggtttattcacagtttgtggcaccttattagcaggatagagggcaacaagctggatctaaaattcctaaggtatgctctcctcaagtgaaatcagaaatgctagatgttctggggcaggagtgttctattctcaaataaatttggcagagtgttaaagataaatcagtttctttactgcatgagttttcagagccattaatacagccctgtgcattgtaaatttctaagaattggataaagtatgctgttttttccaaacttatttagccagagaccctaatgaccatgggctaagaaggaacaggccagagatgatgcctcttgggacagttaagaaaagatagaacaggcttgaataggctctccatcattaggagtgttctcctgaggaatggtcctttagccatgttttttaaaatctacattgtgagtagttccactctgggctacgttggcttgacatgtcatatgttgttgaaatacctttctctgttgtctttaggggatgtcattagaaagtgattctatgtttatttgactctaattcccttctcccatttgctaaatgaatcttcacccaatttttatagtacttggagtgtaaaaaatgtattttaacttatgtattttttaaaattaaactttttcatttttaaataattgtagatttgtctgcagttatatcagataattcagagaggttatcttatgccctttatttagttttccctttttgcaaaattacagtataatgtcacaaccaggatactgacattgattgacactgtaaaatgcagatttccatcaccacaaggacccctaacattgcctttttatagccatacctagcattccccacttctctgatccctggtagccactaatctgttctccatttctataaatttgtcattttaagaacattatataaatgtactcatacagtatcccctttttgggattggttgttcttgctcagcataattccctggaccttcatccaagttgtatcaatttagctaaggagtacttcatggtatggatgtaccacgtttggtttagccattggctagttgatggacatctgagttgttttcagtttttgtctattaggaataaaactggtgtaaacatttgtgtacagatttttgagtgaacatacttttccttgctctgtgataaatgccaaggagtgcaattgctggtttgcatgggaattgcgtgtttacttttataagaaactggcaaactgtttcccagagtggctgtaccattatatggttttaccagcaatgtatgagtggtctagtttctctaaatccttggcagcatttgtcattgtctggacttcttttttttctgagacagggtctcactttatcacccaagctggagcacagtgacatgaacacagctccctgcagcctcaatctcccaggcttaagtgatcctcccacctcagcctcccaagtagctgggactacaggcgtgtgccaccacacccggctaatttttgtactttttgtagagatgggtttcaccacgttgtccagctgcttcttgaactcctgggttcaagcaagctttctgccttggcctcccaaagtgctgggattctttttttttttttttttttttttgagaactaagttgaaggaaaaacaatgtctggcaggagcaagagccctgatgacctcttgtttcccacagttctgctgttgcctgtttgggggagaggaatgtggcactcctctctccaggatggtggccttaaagtgtatgaaaagtcattcctagtctccactttggtttcttctgtttgatttggaatttgggttacatcatctttgccaaccccttcttcttccacaccctttgtaaaatgggtcagaagcaggacttcttttcttcttaaactgagcaagtaggggaagtggcatacaaatcgaactattctgttttgtttacctattctctttaaaactgcccatctgttgtccatttgttttcttttgaaaagttaatctgaaatccacccccccggcccctgaacgacagggtctcactgtgttgcacaagctggagtgcagtggcactatcacaatcacgagccttgctcaagtgattgcctcttgcaatcacttgaactgagccttgcccagttcagcctcttgagtagctgggactacaggcacatgccaccatgcctgcctaattaaatttttttattaattaattttttttagagacagtctcattattttgcccaggctggtcttgaacttctggactcaagcgattctcccacgtcggcctcccaaagtgctgggattataggcatgagccaatgcaccaggcctgaaatccctttaacatatttttttccccttggctatttatttatggcttttgaacatcttaattagactggattggagtaactataagttaacttaaaaaaatgtcgaaaggcataggggtattattttgggtaacgtatccctaaaatattttggtggcagtgctgtatttcattaacataaagtataaactctattccacctgctttttttttaagaggacatgaaaaaagaaatatctctcatatagaagttttggaagtatttgacccacttagtcacaaattatcttcaactcagatattctgcaatatggaaactattgttcttttgcagtaggccatactcattttgcatgaccagtctgtttaatgcttttctagtttgccagtctctagtacctaacttgattcagcagtatgacctgtgccatagtcacttttcagacggatattcatgctgaaatttgtgttcagcttcttaaggcaacatcagccttggccagtggttttcagacttagtgcctgtttaaaacaattttttttttcatggaacccataatgtagtaatgttttgggattgtattttgggagttcatagttaaacctataatagtgtaaacctaatcactgatttcagtgaggctgttttgatgaacacaaattagaaatagtaggggagatttggtttttgctctggttgcatggaatagagagactcccgattcaccagttaagcagtacacatatcacagtttttaaaataactagtcttgcaatctcaggatgctttccaagtaaatagagacggtaggggaagctttattctgagatctgcacaaaagtgggttatcctggcagcacagtgtacctcgtagttgttctctgatgtgtaaaacttggtgtaacacatctgagtgtgtgtgttggtgttttattccagtagttaaaatagacataagacaaattcatataaaatgtttgtagactgcaatgtcttctgaagaatgctgtcagaaaatcattattctaggtccccaggtttacatccctctgtgagacgctcttgtaccagttgttgggtaatttgaacagttgcctttgtggtaccattaggagtctcaacttttaaggatcacttacagttctgtgcataggtgattttcaaagcacctgggtgaagttacatggctctagaaaattgagctttagaaaacagcaataacactgaaacaatctttgggagtgagttatcagagaacgtgcattgttgccaaggatgctggcataaattctgggaacctcaaaataaaagaatccatatttaagcacttcacaatttacctgaaccgaacactggagtcagttcctacctgtttccactaatctctgggtaggggctgggggcaggctctggccctgggtgtgcgttttcaggaggcagttctggctgacttgaacttgttacctgagctgcatttacattctactctctcctcatctgcaactgccccagtttcttctgtagttaggataggcgagtcaaatgaccttaggcaaagaagctgttgaacatacaccaggctcggtgtaacttttcattgttctaaaaagatactctttttccagtctctgggatttagccacccttggaccagggcaattaggtatataccctggagaggggaggaaggtaagtgatgggggggagtaggagagtagcatgaaagggacattgtggacattaagaagccaggaaatctaatcaaaatatggaatgaatagggagaactcttctttttttcatagttataaaatagttacagagaaaaataaagactttagtaaaaggttactgtaaaaactttaggtttcatttcattggaaacgctgttaatatctttgttaaaatagatgaaaaatgtagctacaatctgaaggataaaagatttttgttccctctcttatcccctctgctttctaaaatgctttttttttttaatagaatataagaatttggattggtatatatggggtatatcattgtctaaatctttacgttactgtgttttatttatttttttccctcttgatagaccactttccccagctctttgaggaaagaggggcaaagaggggaaagaaggatgcttggtgtgtgtgtgtgtgtgtgtgtgtgtgtgtgtgtgtgtgttttgtagcagtagtagtagtggcagtaggtaaaagagtgttcactgggttattttcctcatcttgtttcttaggagaaggtttttcttatttatttttgagacagtgtcttgctctgtcatccaagctggagtgcagtggttcaaacacagctcaccgcagcctcgatatcctgggctcaagagatcctcctgtgtcagcctctcgggagctgggactacaatcacatgccaccatgccgaatttttttttttcctagagatggggtctcactttgttgcctaggccagtcttaaactcctgggctcaagcagttcttccaccttagcctccccaagtagtggggttacatatgcgagctggtcttcccttcccttcctctcctttcccttcctttcccccttcccttccctcttcccttcccccttcctcttcccttttgacagggcctcactttgtcaggctgatgtgcagtggcatgatctcaactcattgcaacctgtgccacccaggctcaagtgatcctcccacctcagcctcccaagtggctaagactacaggcatgggctgccccacctggctaatttctgtattttttgtagagatggggtttcaccatgttgcccaggctggtcttgaactcctgagctcaagtcatccacctgccttggcctcccaaagtgctggaattatgggtgtgaaccactgtgcccaacccaaggtttttctttttttgaaagcattatcacttggtgaacattggccagcaagtgtcttggtttctttagatatgtgtagatgcacaggacgtcctcttagaggtaggaagcaggcatgtacacatgtcctgagctgtacttacagcctcaccagcctttggcaagggtttgagacagatgtgcttagttcctgctaagaaggcaaatgtgtctatttctgctgatccctgggccctggagtctcaggagacatttatggacattgactgggattagtaggtatatccaccagacaggatctggtgtagacagattgactcaaacagactctggggaaatttattgagaccttgccctcattgattgctgcctagaggatcttggggctggaggactcttggcagccatctaaccatgtgtcctaacctaggagaagtttcttctgtagcacctccgacagctaggtatctactttttgcttcactattcccagtgatgagaaaagcaaaagcccccaaaagccctgtcttcttttgaactgggatctgcttctcactctccatttcttcttgcatagtctactggaatatcacagaacaatttttctccctcctatccatgagtgcagttcaagtatttgaagaaggttatcatacttttctttggtcttatagtcctcaggctaaataggctcacatcctggagtctcagtccttggaagatgttgttttcagacttatcactattctgatcaccttgctttggaatcaccctactttgtccatgaaccttttaaacaactgttggtgtttggggatcacacatgcttggcgaacacccttgaactgaattaaacagactttctcagtctttaatgggctcctgtggattgtgccttttgaagagggtatggagcctgtggcatcacagcatctgtgttcctccaggcagggtggggaacatcaagctaagtgcaacctgcctggtgaagaatgctacctatgcattgcttggacaaaaggttttgttattgttgttttttaaattttggaagtatccctgatatttgcattactaaaacaataataaaacataggaaagaaaaagcgaacatcacctaatcctatcaatttagatataatcattggaaaaaaaatcagtatttttcatatttttctgtgctaacttacataaaatatatgatatattttaaaaaatggaatcatgaatactattttgtggtatacttttaaaatttaatttttgaggtcaaagctttctagggcagtagaaagcatgatactccatttacccactgtagaggagtactgtagtttatctaaccatgtcccttattgtcagataatttaggttatttccaatattttgccttataactgtccatgtcctcatatttatttctcttggataaattcgtggaagtggaatcattgccatcattgcctaataggcattttgaaggatgctttttttttcacctgattgttatttaggaagtctcaatagagaataaatcctccaccttgtcaatttcattgtcttaaacaagagtctacttggcagaatggcttgttctctttgcttggatccgtgtatttcttagaccagtgctccttggaccctagctcctgaggcaaacctttttcatgcaatttagggttctttcagatctccctgtgtggaagtgttgtcttctactacagtatgtttgctggaatgagaaagtcctgtgacttcacttgtggtttcagagtcacagcttccaagtatcattgtcttggcagaatcagccatagctttttccttggctgaatcctaggtaggtgtgagcctgtattatatgattcagatctttgcccttgtcgtgggactttcttaccttgggcctttgaatgctctcataaatggtagttgagtagattcacaaatgataaggcacatggcactttcattagatgaaatgtaattaacaagaaccataagctaatatgcatgtagaactagtccaatgtcttagaagataatttagtatcataatgaaaggagacattgtttttcttcccagacagttctgaaggcagttgattttatctgtatagccaacaacaatttcttaagtctcatggtccttccccactccactagaagctgcagagtagtccttctcattctcatttactgtcccaatttcctgaccctttcactatctccctgtcctgggagaggggtgtccaggtgatgaggacctatggcctcttttctgccatgaggagctccttgtggagccctgtcctccttgctgaggccctcaagagtgcagcctgcttttctgtgtcctttcaaagctaccattgtgtactatgttgcttgtggctgtcttttctttcaagcctggcagataggatgatattcctcagggacctccttatttgctgtctcagaaaacaagcacagaggactttcttagttaccctgtagaacagacaaagaaaatcaagacgcccagatgcggggaagtgactgagaaccttgcaaggttcttttaaggcaatctctctgctctttgatgcctaaccttatggggcacagccacactcacttgcagaatctgagctaaggtgtggccaggagaagtccaggccagtgaatgttatcagtggtcatttcttggtttcctgaatccatctgtcttaaatcagctgtcactagcaaccaaaaaaagatcttatcatctgtcataggcatgacctgaagagaagcagctgtgctttgttttttgctaagtcttgggcagttcagtttggcacttagagtattccagctccttttcttataagaatatctatctttatctatctatctatctatctatctatctatctatctatctttaactaactaactaactaactaactaactaaagcattttaaaacgtggcatctcgctttgttgctcaggctggtctccaactgttggactcaagcactcctcctatcttggcctcctgagtgtctgagactacaggcacaggccaccatgcccagcctcagctccttttcttttaaatctcttggtccaatttatattctttgccagcatccttgggacagcacaaatgttgaagtttggggaaacattttgtacaactttgttcactgaatcacagtcactgcttgtgctgttgataatcaaaactaggctgcacagagtgacgtagtcacatatttggcttgggtgtacagatgtttcccttcaagcatcttggatgtcttgctccttatcagaattttatctcccccaaattcattgtttgtgaattaactgtaaagttctgggagcgatttccttttcaacagtttgcctttctagaaaaaaacttttggagtttaaatagcacttaaccctctatcattttactctctctgaagtggtctctgtggagaacatgttgggtcttctctgttcaatatctctctctctctttcttggcaaagcctggatgcgagaagttggtccaatctttcctgtccagggttgcttgttaatacagcatctggagcaaaggaaaggctattagcaccttgtcacttggagtttcttaagcattgttccatttatgtgttctttctgcagagatttaatgaaagtggcatctgtctttacacctgacatatgcaggttgtccgcagaactgaacaagtggtgtcagcaacactgtatatgcaggaaggcttcatgctcacgtcgttttttctgtgttctctgggagtagccaacttctttattcatcagagtagggctttacattttaatattctagagagagatgcttgtggtgatatatttagccttaaattcaggaatggcttcttttttcaatgtctttacattttacgcctcccattttctgtgttaataggtaagtgtgcctacatttaaattctgaaatggcatttgctaacatttaatcttggccaagttatttaacttctctgtgccttactttcttcatctgtaaaatgggtgtaataacaaaaaactacattgtagctttgttttgaaaattaagtgggatattacatataaaatatttcataatagtgcctggcacatagtaagtcatgagtaagtcttagctgttattgttaggggtagtgtcgtgataatgctaaatgctttgattaaaagaatctaattgtatatttgagtcacagattattcagatatattttatataaatatttcaaaagaaatacctcaactttgcatgtcttcctggccctgtacaaggtacatgttgttatgttttctctgctcagagctattttaagccagtacagactgtctacagaaatgggtttagaatgttttttcactctgctgttcttaaagagggtacactgcttttgagaaatcttttttaaagaaagggttcaagttcagtgttgagaaatttgtctctgaggacaacgctgtgcatttccaatacgtatctgtttttcatcttgctttcattgcagatctgcatgtatttagatatatgctcaagtccctctttcacttcccagttacttagagtgaaaaaaagaaaacatcagtagttggtgcctgttcattcacttagggctttcttggtcctttcagggcactgctgtctgttgctgttgcctcactcagtttgcttcctcttggatttcagttatgattgcttttttttttttttttgagacggagttttgctcttgttgcctgggctggagtgcaatggcgcgatctcggctcaccgcaacctccgcctcctgggttcaagcgattctcctgcttcaaattcccgagtagctagtattacaggtgtgtgccaccatgcccagcttattttgtatttttagtggagacagggtttctccatgtttcagggtggtctcgaactcctgacctcaggtgatctgcccgcctcagcctcccaaagtgctgggattacaggtgtgagccactgcgcttggccgattgcttttattttatagccggtccttgatcgggggtgcagggtgcattatctgagttcattggtgtgtgtggctctgtgtctccatagtcagaaggattcctgggcatgctggattcttttttttttttttttttgggaaagagtctcactctgttgtccaggctggagtgcagtggtgcaatcttagctcactgcaacttctgcctcccgggctcaagggattctcctgcctcagcctcctgaatagctgggattacaggtgcctgccaccatacccagctaattttttgtatttttagtagagacggggttttaccatgttggccaggctggtctcaaagtcctgacctcaggtgatctgcccgcctcggcctcccaaagtgctgggattacaggcctaagtcacagcacccggcccatgctgggttcttaatctccaggctgtgctggactctcaccttctaaccaaccttgaggtatttcagtcccagcactattgacattttggtcaaaacaattgttgtgggggctgtcctgtgcatgataggatgtttaccagcatctgtggcccctccccactagatcctggcaccatcacccactcttcccacagttgggataattaaaaatgtctccagaggctgggcacggtggctcatgcctgtaattccagcactttgggaggccgaggcgagcggatcacctgaggtcaggagtttttgagaccagcctggccaacatggcgaaaacccatctctactaaaaatagaaaaattagctgggtgtggtggcgggtgcctgtaatcctagctacttgggaggctgaggcatgagaattgcttgaaactgggaggtagaggttgcagtgagctgagattgtgccactgcactccagcctggggcgacagagtgagactccacctcaaaaaaaaaaaaaaaaaagtttccaaacattgtcacatgtcctttggattgtagaattggcccccccactgagaatcattggtttagatcagtgggtttcaaatgtcagagagcaggtgtgtattttatcatatttagcttctagagttatgtctaagtctcgaaatttacagttttatgatatagccattgttgatttatctaaaagtctatatgcatttaaaatgcttatttttgaaatatttagataaccaaatctgtatgtaacaaaaataacaaatcccaccacatagcaatttgtcttgttttaagatacctaaaagatcagaccagtggttctcaatatttggtcctgagaaacagcaacattaacatcacctgataacttatcaaaaatgcaaaagcaggccaagcgtggtggctcatgcctgtaatcccagcagtttggaaggccaaggagggaggatcacttgaggccaggagttcgagaccagcctggccaacatggcaaactcctgtctctgctaaaatatggaggcacacacttgtaatcccagctatttgggaggctaaggcatgagagtcacttgaactcgggaggtagaggttgcagtgggctgagatcgtgctactgcactccagcctgggtgacagagtgaaacttttcctcaaaaccaaacaaaacaaaaaagcaaaatcaaagcataggagacctatctagacctactaaatcagaaactctggcagtggagccctgcgatctgttttaacaagcccttcaggtcattttgatgcacactgaagtttgagaaacacttggttagttacttaggtaactaggtaactaagtatattactaagttacttagataattaagttagctccagttagagacccatagaataaaccttattgagaaataagtataacctgctatatacagaactttgaaatctgcttaggaaaatgacttttaccagacagatcatgctaagtgtgtgctggtcatattggcttccctgcaagagcctgccatgtccacagctttctttacaggatttccttttgttagtatccccaagcttggtgcatgcaacttcacagtttggtggccatagctgcttgaactaggtatgcttatgcctgactcccaaggtacgcatcgataggctaaccagcagcatgtattgggaagagattgatcctcttgggagtttgagacagagacaaagaaatgggaagacagcaaaaggcatgaggaataaaagcccttagttaagcagaaaccatgaggagatgaagaggctcttaatgagccagtggtaacaagaacaataggaggtggaattgggtgacagagcacaggatggctgctttggaaagggtgacttttagaatcgaagttgagtcaatgtacttaaactaatatgtgcacagtatgttttagttttctagaaggcccaactgggcagctgctcataggggttcctgttttgtacttccctattttgcttgcttctctagggagcctcatgttaaatcatcattaactgaggcaatttcataatatgtctattccttgttgcctggatgaacccattgaatatataactatattagaagaccaagtggtttcagatgggttgcaggtgggtttcatggcatgctgcttcgttgaagcagtgactctcagcctggctgtgcctcagaaacacctgggtagcctctgcctctttatttaaaaactttctgtatgtgagattctcacgggcagttgaagtctgtattacaggagagaatgggagatagaagctgttactttcagcttgttgatgggttgactttcccaaaataaagctgcatagggcgtacttcagaaaacttcaggccttacttcattcatttccttagatcagaccaaataagccagctcaccatatttattccagagatgtgttgctttgcctccaataacattttccttaacatttcctgttagagcctctgggtactatttcttttgagggagatgctaagagtttgaaaagccttaaaaaaatcattaaaaatacatggaatagagtgttgaaatcagcattgtaaatcattttctgaaaattcagtaagtctaaagaagtttttctgttttgaatgatcggcactgaccctatccagttggtcagtgcctcccttatcctgctagtcacctcttcctcctgtctttcctattagaaccaaggaaagtatacaagtacctccatgcagcaaatccactggattctctgacacaaatcaatccagaggggaatgagtgaagatacagaatactttacattgttgctcagatggttggctgagttccattagggtaatatattctgggaatgtggtccagtgcttggtttcaaggccagcttaaaagatttggggcctgaccaagagcataatcaggattctcttattctccaacctagtatccttgaggagattgtaaactactcgagagtccaggactgtttacctattgtacttttatgttaagtacctctacccctaaaagcaatctctttgtgatatacacagaatatttgcccagtaagtcactcagccttgagtacaaattttaagcccgagctgctttcctcaggggcccagccagtctctttactcagcagccttatctgacatagcccatctttaatttagctttgttcacgatgcagggatcaataacagcgatgctgggagggagggagaatggccaactgcaaacagccgcccatctcagcacttgaactgaactctactttggtcaggatgattagtgcagtctggagagccattaagtgctctctgactagttcatctgagttctgcttcccactacactcaatgactaacccaggagattacagatgcttgaggagaaagagtgtcgtgtctccctgtgtggtactgagtagtgtttgtaccactgtctcaggaatgtgaattacagtgcaaatgagctgcctctcttgtttccttttctgcacgtcattttagagagagtgatttattttctgtttgcgaaggcttggtctcatcatttagatgagagagaaattgcatgtactttcaacttttggctggttataggcatctcctttttttttttttccattgtgagagttgtttatgctgattgaatgaaaagattcgttttcttaggctttcagtgatgacactccatttcttccatgtgataaaattataatgcgtgattttattttattattttttaaaagtaaaactgtcacctaacatttcctctacagttgggtaaaaaactaagaaaagcatctcatttcctattggttccatgagcaaccctttttagcatacagatcagaagccttgtgtggctctaagcctatttcctcaattggggaagtaacagactctgttcccaagatatgaataggtgtgctgggtgagaagtgctctgtgctcaaggactttgacccttcattttccaaacttaaacaagtttctccatttctctgttcttagaacctttggtattcatatacttaacatgtacatttcttgaagcgccaattatcatctcacaggacactggtgttccagggaacttggagaaaagctgacaagttattttagtgtgttatcttttacacaaagggactctgttttagaatttgccatatctgctttaacgctgtacaaattagccaactggagaaatatatgttaaataacgggtgaacaacacataatcacccaacctacttttaggaagattactaaaacattccatttaacaatcattcagcactatctgtttgtaaaggacacgtaagttttaaaggaagaagctggtgacttgggaatggactggaataaagtcagagaagtcctttgtccagggaacttcatcattgggtttgacttgagaagaacaaatcagataagattagtctcctcattataaatgtttaaggtaatttcagatcactctgctttaaaagtcttgtgaaatggggttgggaaagtttccttaaatcatttacacttgttgattgtgtgcagtttatattatgagcctgctgcccccacaggtgctgagctgtgctcacacatgggaggggacatcacagaaaagaagacgtagatttattacctatggttctgaactgggacaattgataaaaattacaggtgctgaggattggcttgaaacgcagaataatcttcctaacagagctgtccactcatagaatgtgcttattgtgagggtggggatagaggatggggaattgaattccttgcagctgggtaagttcaagtatagattgcttgccctcttaactaggatgtcctatagaacagccgtccccaacctttttggtaccagggagtagttttgtggaagacaatttttccacagaccgagtgggtagggggatggttttgggataaactgttccacctcagatcatcaggcattagattctcataaggagtgtgcagcctgcttccctcgcatgtgcagttcacagtagggttcacgctcctatgagaatcaaatgccttggctgatctgacaggaggcagaactcaggtggtaatgtttggtcacctgccgctcacctcctgctgtgcggtctggttcctaacaggccacagactggtactggtccacagcccaggggttggggacacctgctatagaacattcaagtaggaaaatacttcctttggtctaagattctgaaatttacaatgttccctgctcatatatcaaatgatgtattagctagagcttattgaatgtcacagttttactgtcaagaacttaaaacttctattatgaggcagagcatttggtaaggatagttgagtccctcagtgactgtttggattggttctatgtcctaggattgagtacatgatatcattttgatgaggttaaaatccaattaggaggtctgtccctttggctgctggctgggtttgttactttttagttccagtagagatatgtgaagcttttctgaacatgtttagcaaggtttgattttggcatttctgaatataactgtgagaagaattatcttcctgctgtcctggtggcagaagacattggactttgtttgcttgtctctttgggggcagatacacgggcatttaaagagccattctaattttaggaacttgagaatcaggagtcctgagggttagtgctaatactttaaaaggttcttaggtctgcaattttagttaatagtgtggggctgaaaaagcctttttccaggaatattgtgagagtaagtgggaagtagagcttttagaattttaggagaaaagggcatggctatttcagttaataatacatgaagagttttctcctttcagagtcctcctttctttgggtttcaaaaggtaagacaatccacgggttttttagtttgtctttcaggtgaattgtaaagttttcctgtaaatactgtcattgcactgacatggatattgctgagcagataaaacaaatagcaagttgaggaggcagttaattcacactcttccttctctaatatggtctgcggctctaagaattgttgtctcatccatggcttttagacccttaaattttagtgagtttcatcacacggaaactattgataatttcttcttctgaagttttttgtaagtggtccctgctagctaatggtgcacaaaatgaagcaatacaacatttctcttatggggactgggagagaactgacatcctttataaatatgtagctgatatataggttaccagcctaagggctgcctggtggggaaagtgaggcctgtgcctgtctctaccactgaagacatgttcatcaagccaatatatgcctcagacattaaaaatatcctttttttcattttaaaataattgccattaagtatacataacataaaatttaccattttaaccactattaataaatatatgttcagcggcatgaagtatattctcaatgttatgcaacgtatccatttccagaactttttcatcccaaacagaaactgtatcaaacactgagtcctcattccacctccccatcgcccctgacaatcactaatctactttctgtttccatagaaacagaaaatatccctatttggcatgttttatataaatcaattatataatacgtggccttttgtgtctggcttgtgtcatttagcagaagggtccccaaccccagggctgcggataggtactgttccatgaccttttaggaacctgggtcacacagcaggaggtgagcggcaggtaagtgagcattaccgcctgagttctacctcctgtcagatcagcggtggcattagattctcatagttacgagaaccctgttgtgaactgtgcattcaagagatgtaggctgtgtgctccatatgagaatctagttgatgctcgatgatctgaggtggaactttttcatcctgaaaccatctctcctcccccccacttttattgaaaagttgtcttccaggaaaccagtccttggtgccaacaaggttggggactgctgacttagcatatgttttcaagtttcctctatgttgtagcatgtgctagaagttcattcctttttaatgctgaataatattctgttgtatgcatataccaatttttaaaaaagtcattcatacttcaatggacctttgaattgtttttattttttggctactgtgaatactattgtgaacattactgtatggctgaacattgctgtatctgagttccttctttcagttcttttgagtatatacctaggagtggaattactggatcatatggcagttctgtgtttaaccacctgtttcctgcagtgccttggctttttttttttttttttttgacgagtctcattcttgtcgcctgggctggaatgcactggcacgatctcggctcactgcaacctctgcctccccagttcaagtgattctcctgcctcagcctctggagtagcttggcttacaggcgcctgccaccacgcctggctaatttttttgtatttttagtagagacaggttttcaccatgttggccaggctggtctcgaactcctgacctcaggtgatccgcctgccttggtctcccaaagtgctgggattacagctgtgagccaccgcgcccggtcgccctggtccttttgaaactgggcagtaatacctgtgcttgtaagagtgtttacaaatatttatcagccttttggaactttaaattagaaaagtgaacagactgtatttgttagcactttatatacttacattatgtcatggaacttattattcgtgtttcctgaatgtctgttgtttggatacctgtgtgtgtttcctactctattagaaattccttgacctgatctgcagttctccatctttgtccaccttttttgtaccttgtactcaataaatgtttgttgataaattgattagatgtgcaacatattctaaagtattatttttaaaaaagagatccatttacaagaagcacattggaattatttccaggttttgttttgctaaagttaagatctgacattatttgttaatttctcttggttatggaatgaaaagtattcccactgttaaaaataaatgttagatgtaggaagtaaacagagatgtatttagacattggggaaaggcttccactgggatctgaaatattgtgggaagagaatcgctattgttagagtagttctgtgccgtgttagtctttattttgtttagatactgcttttttgggggaccactctgcaggcatctaaatctgaagtgtaagcctcttttttgataaatgagggatagctaaaagatgggttattttggttattggttttgcttttaatagataaccagaatttttacctcttgggagagaatgttatctacttatttatagcaagcaagtgttgttacggcaggtggctgtggatgttggcattcaaatggcactgataagactttaaacaaggtagccatccagttatgcttaggctaaaaaatggctgtgtgcagattaggctacatatttcacatggatataaagttctacttttattaacaaacataacagtgcattgcttttgtgtttttagtttctcttagcccttatttcttgtctcttttggtggcttgctgttgtctatagctgagctgaaactttctgtgcaggaattaagcttaaaatatcagtttgtagtcagctgtggagtatgataaaactttgagcaacacagtttccaacaacacccctttgtcactgtgcctgagaaagctcttattaatagaatttcatgtgaggttccgtgagaaggactattgtacaaccattttttttttttttttttttttgagatggagtctccctttgtcacccagactggagtgcagtggcacgatctcggcttactgcaacctctgactcccagattcaagtgattctcctgcctcagcctcccgagtagcagggactacaggcgcgtgccaccacacctggttaattttttgtatttttcatagagatggggtttcaccttgttggccaggctggtctcgaactcctgaccttgtgatccacctgccttggcctcccaaagtgctgggattacaggcgtgagccactgttccggccatttttttttttaacagtgaaacagggaaacataatatttttcttactttaaaaaatccttcagtttataatcatcaggagtattggatatcttttaagtgaaggtggaagttcacttaataaaaaaggaagctcatttttccttctttgaatggttaacatgggagtaccccaaggtggaagctttacatgactgagaaagcccatccactcattgtcatagaatcaactattaattcaacaaatacttatggagcctttgccatgcctatgagccttgtgctagaagccagggataagtaaaataaattctgcacctgcctcctgcaacttagtccaatttccaggtctcccttagatttttctctgttttaatttttattttgaaaatggagacagggtctcactatgttgcccaggctggtcatgaactcctgggctcaagtgatcctcccgcctaggcctcttaaagtgctgagattacaggcatgagccatcacacctagcctctctcttaaaacaactttattaaagatgtaattcaggctgggtgtggtggctcacatctgtaatcccagcacttgaaaattacttgaagttgggaggtggaggttgcaatgagctcagatcatgccactgcactccagcttgggtaacagagcaagagtccctctcaaaaaaaaaaaaaaaaaaaaaagtaattcacataccatacatttcacctgtttaaagtgtacaattcagtggctattagtatattcacagagttgtgcatctattaccagaatcaattttgagcctttttttttttttaaccccaaaaagaaacctcttccctttaacacttatccccagtccacctatccttctcagcccttggcaacagctagtctactttctgtctctatggaccggcctagtctagatattttatataaatggaattatataatatgtggccttcatgtctggcttatgtcatttagcataatattttcaaagttcttccatgttgtagcatgggttagaacttcattcttcttttattatggttgaatgatattccactgtatgaatataccacatcttttttttttttttttttttggagacagaatcttgctctgttgcccaggctagaatgcaatggcacgatctcggctcactgcaagctccgtctcctgggttcaagggattctcctgtctcagcttctcgagtagttgggattacaggtgcacgccaccgcacccggctaatttttgtatttttagtagaggtggggcttcacctccttggccaggctggtcttaaactcctgacctcatgatccacccgcctctgcctcccaaagtgctgggattacaggagtgagccaccccgccgggccacatctttttttaatctattccttcactaatagattgtgggttgtttccaccttctcactatgtgagtaatgctcttatgagcgtgcatacaagtttttgtgtgggcatatgtgctcaagtctctgatcccctagatgtcttgcctatcctacagatccaggcctaccacaaaaaagtgtagaaggatcatataccatgagaacataaaggagggacatgtagacttaattagggagtcagggaaggctgcccctgaggccaccatatccaagctgcggcttgagagataggttgaatagaaaagtttttcaaactgcagctgatcacccattagtaggttgtgaattcagtttagtgaatcatggccagcattttttaggaggtgaactaaaatagaatagtagatgttagaggacattccatgtggtaagggtaagtattgttgcatgaaatttattttcagtagctatatgagcgcatctagcaaattgtgacgtaagaagtattctatattccgggttgcaatcagaaaaatatgaaagccactgctctagggattttttaaaaggagattatttattaatctggagctttaaatatggttccactagaagattggagagatacaggagagagaagaacctagaaagctgaagatcctttgaaagcttaaagttctgtgatttctacacttttaaaatgattcatttattcaacaaatattaaaatatttaccataggcctagattgcactaaattctgggagcatatgtaagatttgtgtgattttgttttttttgtgatctggcagagaagatgtacaagcaattaaaatgacttctataaaacatggtgggttgaggccgggtgcggtggccaaggtgggtggatcacctgaggtcaggaggttgagaccagcctggccaacatggtgaaattccatctctactaaaaatacaaaaaactggccgggtgtggtggtgggcgcctgtaataccagccactcgggaggctgaggccagagaattgcttgaacccaggaggcggaggttgcagtgagccaagatcgtgccactgcactccagcctgggtggcagagcaagactcttgtctcaaaacaaaacaaaacacaaaaaaaaccatgacgggttgaacgcataagtacctttagtttttccaaaatgtctctaaaatgaaataaaataaataatgaaataaaaaagacacaggcacctcaaaggtaggagaataggagaggagatcacagcagttaattgccatcaagatgtctttggaaggagtcactgactaagctgactggcttagtcactgactggctaagcagaggaagctggactctaaggatctcaaagaggatatcagtaagtgagccagttagctccataaaactccagaaaagttcaggatttggaagctctaggtcttgcataaggctgtaggatatatagagcgggggaaaaaaagagcattagatggagatctgtaaaagctgttaagccccagttcccacccccacccatcagatccaggtgcttgcccctcctctcaccctgaaggttctattgtgaaaagctgtaaatcattagccatccatccccccaacctgcaaaggtacacacctaatagatatgatacacacccatcagaaacaatggcacacttagtttagaagggaaaagtgggcatacccttgtgggtgtgtcatgatcttagagggccaggggataagtagtttgaaagtgatctccaaggtgattttgaagacacaattctcccatcccactctcgattactagccactgattttgtctcaggaggcattagccgcctgtcaaactgctgggacattatttttctcttagtcaataaaagtagtttgacatccatcacatatagcatttgctaggtcttgtgggaggcaacgattacaacaaaagggtaaaatattgtcctgtgctcatggaacttcaaatctagttattggtgattatatacattctaaattaaacactttcaaaataagacatcttgtcaaggtgaaggattaaaaacctttttgtcctatcctgtctatatttcctctcaccccctcccatctgggtgtgctcagataaactttagagcacccaaggtttatagaactcctgacagcgacctcaccaaaggctggacttcctatttgtcataaacttgttgaaattttgtttgactgctttagtacaggagtatattccccaagacaagagacctgagagcttttccctggttaagataccaaggatgatttccaaattttagacatccttccccttgttccaccaattttttttttcttctgggaaaatagccaggatgattgcaaaacataagcttgtaaaaaggcaaaactccatggatgtaagaaagtaaatttcttgagggccacacccatgataacgctggaattttcatttaattcctaactcattttttgttgtttttgtttttttaaactcaaatgtgtctctttaattgaggtcacttacttggttgggagattaatattctggtggggaaactttctttttagagtttatattgttttattccttcagtcactcagtattactaatggggtagcttttggaattttccatcccccccactttcagattacttttgtctttttttttttccctgagaaattagtgaaaacagtttgaagtcttgccacgttgtaaggagatttgcattatttaaggaaacagctggcagatctctataatgccccacctctgttctgccagtgcctaaaatttcctttgcatgactcagttaaaaaaaaaaaaaaaaaaaaaaaaaaccagaggaggggaacgagtggagagaagaaacccttgtttccctttctgagttgtaaaaagcttttatcaaggtttacatttagtcatgcttctgtcctctagtggatggcagcatgtgatgaactcagagaaactcttctcccaaattggccagtaagaactctgcaaaaactgtggatgagctgagcttacctcccataattttattttgaaaataaaaaattttccccacatagtaaacacagttatcttcacgagtgtgggaatgattaagaaaaaaaaaccaagcttagattttgcaagatgggtgacctgaagttttgcctagagggagagaagggtctcttcctcctttcactctgttcttgacagcgcctgcagcctgccctggaagaacgggtttcttcttcagatagaaaggaattgctggctcttctgccagccttgcccataggcctggctgtttccctgatgcaccttccctgctcaagttgctatccttatcattttatatttttgtgccagtatagatttggtcctataaggctgcagatacatagtgggcagaaagatggggggatgagagcactgagcctacaacctatttggagggactctgggcagcatgaggatgaggggcagggccagggccaccgctaactagttagcagtcaggcaaatagtcaaggacagagaccttgtatacattaatagtgccagcattttaaagatctttacccagggaaggctgtatatatacagttatttgggagaaaccagaaatggtgtatttaaaaaaattggatgccttaaacttccaaataaatgcgttttagagctcacttatctggaggttggcctataacattccctctctgatgtcttgcctttcaactgttttttttcacttctcagagtgggcatgagaaaccacaggatgtagaaacatggagtcagttttgctaaagcaggccctcatgagacttggaagggaagaggtgatgagtccaatgagagtttaaaattagatgttcagttattgattctatgttttctttgtagtcagtctttttctaattaaagtgggtaagacatttgaatatagggagataaatgtgctatgttaaaggatataaaaaaatcctggaggaagtctgaactctaaactctttggcaagtctttctgcctgaattttgaagcaaacttaaagattatatatgtggctgggcctagtggcttatgctgtggctcctgaccttgtgatccacccacccgcctcggcctccatcccagcactttgggaggccgaggcgggtggatcacgaggtcaggagcccaagaccatcctggccaacatggtgaaaccctgtctctactaaaaatacaaaaattagctgggtgtggtggcacgtgcctgtagtcccagctacttgggaggctgaggcaggagaattgcttgaacccgggaggcagaggttgcagtgagctgagatcacaccactgcactccagcctgggcgacagagcaagattctgtctcaaaaaaaaaaaaaattatatatatacacacccccacacacaatacatacatacacatatatacgtatacatacacatacatatatatgtatgtatacattcacacatgcacttatatattcacaatgatagttaagctagtttttgccctccttatcagtatgtcacatatccatgttgtttcctggtatatccagctgtttccttaatgagactgcctccatctttcagatatttaccaacagttgagtatatacttggctttattgcaggacctggctatgatacagatggatgtactctgtatagatgcccaaaataacttttatttttatgatggttagattttgcctgcatatttaaggttttgctgtatatactaatttgcttcagagtcagaaaaatagcagcaaactctgagaggggactgaaaaagtatcactgacttaggggttattatagtaggaatggaactacagagatagcctttgtcactgctttgtgagaaagcagtggagaaaaatacaatagctcctatttattaaaagcttcctatatgtcagtactatatgtattatctgttttaatcctcacagtaactgtgtgaagcgggtcctaattatcttccttttacagatgaagaaagtgaaggcagtctttaggtgtcctcccaaagttgcagaacatgagaggcagagtgtggatgaggctctatgtcttagattataaggacagtgctcatttccattgcattaaggaaaatatcctagtctatcctgtttaatcctaggaaccctgtggtgtggagaggttttctcttacataccaattctaagcctctgctttgatcctttgtcttggtaggcatcttctctcctcatttactgctcactgtgtgaggatgataggcactcctcagttataaacatcgcccttgcaaacatagcagcttggtcgctctctctgcggtctaccctaagggctccctaaatgcccacacatggcggcaggtgccagactggggcccgagcagggcactggctctccacagcctcctccataccgctgcctgctttttttctctcatctcttcccccacccgccattgtttttttgtgtttccttccaggcagattagttaattccacctcaggtaatctcttattctttctatgacaaaatgcattcttagtttcacactgttgtcatataaatgaaggaaccctttcacacaaattgggaattggcaggatttgattcatcaatattctaggctgttagttttccttttgctgtgctcacacagaaccagatacagcagaattaaagagtaataggcaccctctagtcccttgctactcaaattgtggtccatgaccagcgtcattgccaatacttggggcttgttagaactgcaaaatctcagcccctcccaggcctacagaaccaggtcctgtagtctaacaagatctgcaggagcttatttgcacattacacttgagaaacactgtaagcctaccctatttctgtccttttcttcctaagctaaatgttatgacttggtcacagctgaaagccttcagtgccattattagtaatgacgttggtgctgataaggtttgtagataacattaaactgaaaatgtttcttgacgttaaactgagaaatgcttctaatgaccaggaagacagaattgaaagtagccttaattaattgaagtgattactgtaaaacaggttaaaattgcatagggaacactgcctgcctggcgaagcattgcatggtgtgaggagtgggcacaggcgcagcactcaggtgttttgcgtttgtctagaaacactgtcctttcagtccttaagcctcatggacagctgtttctcggggactgtcagggtctcaattttgaattgtcttactgattttagatgagatagtttatattccagagggcttttttttttttttgagacggagtcccactctgtcgcccaggctggagtgtgatctccactcaccgcaacctccatctcgcgggttcaagcgattctcctgcctcagcctcccaagtagctggaattacaggcgcatgtcactgcgcctggctaatttttgtatttttagtagagacggggtttcatcatgttggtcaggctggtcttgaactcctgacctcaggtgatctgcctgcctcggcctccaaaagtgctggaattagacatgagccaccacgccgggccattattattataattttttttaaagactagtctagtgtaatagaagagggaaagagaagaacaagaagttctgtctgtaactgactgtggacaatcaatggagataattcacagcctgcagattagccagagggccaattgttaaatcctcattatgctgccactcttgagtcctgttaggttactagaaagcagtgcacctggagactcggtacttctgtctcagagctgtctttctaaagtaagatttagcattaggcccttagtttttaactgggaagttgagcagagagggaatgtttgaagactgttactacaattttaaaactaaaaggtgtcactgagggtactgagcgtgctgtttattctctaatgctcagttccatgggagaagtttctctcaaagttgagttagggtgtttttttcctaaatgctttctttctttttttgggatggggtctcagtctgttgcccaggctgaagtgctatggcttactgcagccttgaccttctgggctcaaacagtccttccatctcaacctcctgagtagctgggactataggtgtgcattactgtgcttagctaatgtatttttatttttattttttaaagatgaggtctccctatgttgcccagtcttgaactcctgggctcaagcaatccttctgccttgacctcccaaagtctcaaagtgttgggattacaggcatgagccactgcaccaccctaaatgcttttatttagtgagagccataacatcatattgtttccatattcttttcatcttccaggaaattcctaagcttttttttttttaaactatatgttggaagctttcctttacttaggacttttttttttttttttttaatagagatgggggatctcatcgtcacccaggttagaatgcagtgataccatcacagctcgctgcagcctccacctcctgggatcaacccctacctcattctcctgactaggactacaggcactcaccaccacactgggctaattaaaaaaaaaaattcttttttgtagagaagtggtcttgctatgtcacccaggttgatctagaactcctgacctcaagtcacccgtccgcattatcctcccaaagtgctgagattacagacgtgagccactgcacttggcctatttagggcttctaattcactttccttttccttcttgtctaattcttgtgtttttagaatctgcattttattttaagtcatctcaaattccttttggaagtagtgagggagtaaatgctaaccttgtgtagaaaccgtaaagcgtattcaatttgtttctgttttatgaacttgaccttgtgtgagcatcagccatatgcaggactattgggcttggaatgtgccagaccaagcagtctctaattttgttctcagttcagagttgaggggctgaggaagttttgggcaagagtgaggtctgcttgggaggattgccttgacagctgtgcgcacagtgggttggaaggggagcagcagggcatccgtttggcagctgccttggtggtctcagactaccgcatccatgctgaaattggaaaggagaaggtcgggaagggaaagactggggacaaagcggactgatttgggcaacgggtgaggtgcagagagtaaggaacagggacgaatatatgtgaccctggttatcaggccttgatgttgctttgaaaacagtcctctccagtttttgatattttttcttgtatatggggagcttgataaactaagccttggacctttgttgttttgatctgagctctttgtcatctgtcctactccgggaaatgtgaagtggctgcagaaggcacctaacctgttcttgttcccttttctctgcctcgtacctcaagttttctaccactagaggagaggcgggctgaacttccttagcaagatctctttcattttttgggagtcccattttctaatacaactccagacccatcagccacccgggagaccccacgtgggagctgcgttccctttgccagggagatgctcctgggagttgcattaggaaggcgagtcaggaacagatggctgtcctggggggtctggatgtcggcccagccccatctcctcaaagccattgtttgccctggtttgtgaggtgctcaacagcagggacagatgcaatcagagaaggatgaaatgctctttttctttggacctgaaatgggaccctatacttagtgcagccttactcagtgactaccaaaatttgaaaattgtgtttttctgaggctgggctcattgacttccgtgagctcttattagctgtttactcatgaattaggcaatttaatttgggtagaggagggcaaatcaaatgagaaggagctgccgtgtttaaaattactatgaggatagactgttcttaaaggatcctactcaagcctatagaagccttccttagcttacatgtcgagtaaattaattagacgaattgtgaattattctgatttattcagagaaatcctttgctctgcaggccgtactgggcatcatgtggctgacttcttgttctgactttctatgaatgtttgcaagtaataaaatatatttttatgattgagacttatttagtaataatatttaatattaatatttaataattttaggaaaataatttaggtaaggttttgctgtgtattgtagcatgcattcttctaagccatgccctttgatattaaaagttgtgctagtttcaaagggctcgatttccttaacaggaaggcacctataaatctggcagtaggtaatgaagggagaatggtggtcttttcagtaggggagggcagtgcacacagagagttatatgttttttagtctaactgccctaatctaatctcatgaaaggtacatacacatttaatacacatttttctggggcccatagcttttattacattttcaaaggagtagatgactcctagaagataggaacctctgcagaataacttcttgagtgagataacattgttgcgatttgagaaatactgaatctctacatttggtcactttttttttttttttttttttttaaacagagtctcgctctgtcacccaggctggagtgcagtggagagatctcagcttactgaacctccacctccggggttcaagcgattctcctgcatcagcctattttcacctctttaaagaaatatattgttatcgctccctgaaagtggattagttaagtactgtttaccctgcctatgaagaaaacttacttgcacatgttatgttcggacattagtcaatgaagattagtcaatgagaactagtcgatgaacatggtcaatcttgcttaaagactcaaaatatgctggagtatggtgttaattgtggtagtttatggcatttttctgaagagaaaaaacactccagcaaggtaggtaggatagtatattctctgtcttcttcctcctgcccacccctctgtctacattagaaacaggttttggaggagtagtgggaacattgggtgatttctagtggggttagagaaagcagtacctggttctttggccacatctaccaaagcaaagacctagacttgtagaggagagtattgtttgcttgtttgaggattgtatttcccaggtttgttcatttgcatgagtggctgaataatgtaacagagacttcagaagtaaggaaaatggttgtcaccaaaatatcttgttttacctttatttggactaaatggaaaacacatgtttaatagctaaggctattgagtgcttatcatttgccaggaactgtttctgagcctttcacatataacacctcattttatccaccctctacccctaacaaatggtgtggtttgagttggccttggtgaggtatgaaaaggaaacaaagcagtgacctcttcctgcaggctggtcagatgtttgggataacattccttagcattcttggtggaagtggtgatttcgttgaaagctgcttcccagttgctctggagtgcaggtgggaggggtggactttggcttttccaaaggatcccaggaatgggaaggaccttaaagatctagaccaggggtatccaatcttttggcttccctgggccacattgtaagaagaagaattatcttgggctacacgtaaaatacgctaacactaatgatagctaatgatcttaaaaaattgccaaaaaaatctcataatgtttaagaaagtgtatgaatttttgttgggctgcatttaaagccatcctggactgcatgtggcccatgggccatgaattggacaagctttatctagactgttctgaactactcatctgcctcccccagcccccacccccaccccacacatccagaattctccacccattggttgtctggcctctgcctgaatagctgagtacctgtcttttccaaaactaccccttgaggggagacttacagcaccctgtagcatagtatatgatatttggctagtaaaatgtgatcctttaatatttttcaatctttattgagcacccacccacggggttggaggaatttagggggttctgtggcaaaacaagaatagagtctttgcatttgacttctcagacttgtagggacatacaggtaagctggatgttctggtgagcgctgctagaggccacacaagatgcttccaaagcctagaggagggtctgatccagccttgaggagacaaggtggcatctgaattaatgagtgcattaatggtgaatgcatactgttattataaagctcagggatgttacagcctctgatactttacacaaatagaaaggttaaggtaattttctgtataaaataacaaaaataccatctaaaaatgataacgcaggaaatttgaatattcagtactgttttaaacctttcattcttttaattaattttatttatttcacttatttattaatttaatttaattttttttttttagctgaagtcttgctgttgcccaggctggagtgcagtggtgcgatctcagctcactgcaacctccgcctcctgggttcacaccattctcctgcctcagcctcccaagtaactgggactacaggcgcccgccaccacgcccggctaattttttgtatttttagtagggatggggtttcactgtgttagccaggatggtctcaatctcctgacctcatgatccgcctgccttggcctcccaaagtgctgggattacaggtgtgagccactgagcctggccctatttatttgttttttaaagagaccaggtcacgctgtgttgcctaggctgcgttagaactcctgggctcaagagatgctcctgcctcagcctccaaagtagccgcgatatagcacgtaccaccatgcctggctctctttcagttaactttaaagaaatctggtgtttttgtttttgttttttgagacagagtctcgctctgtcacccaggcaggagtgcagtggcactatctcagctcactgcaacctctgcctcctgggttcaaacaattcttgtgcctcagcgttctgattagctgggattacaggcgctctccaccatacccggctaatttttgtatttttagtagagacagggtttcgccatgttggccaggctagtctcaaactcctgacctcaagtgatccgcctgcctcagcctcccaaagtgttgggattacaggcctgagacactatgcccagccttcactgcttttatgcaaaggaataaatagagtgattattaaagtgctctggatcacacacatacaaacacacatatgcacatacatacacacacacaaaaatacacaaactttaggtaacataaatgtgtgtggctgtcagtgaatgctgcatttttctgagcttgtaaccttccctttactaactgtctccacattatgaccacctgaaaaatgctacactgcagtggtacattcttcagcccaactaggattggatcagaggagttactgggttgatagtcttggactgaagctctctaaagagcagaatttctgtgatgtgcaggtagcttactgttaccctgtaagctccattttttatatttctttgcccctccttctcaatattcacacagttttcacaggactgattcaagtgtgaagccaggatctcatcttttaacagagtggcattccgcacagtctgaggcatgatctctttgtgtctaggttgctccatttagcttcaaaggcagcatgatgatttatggtccatttgtattagggaagactcagaggagggctagaattgtgatggttggattaattcattttttccaggcgcaccctttcctccctattcttggttgttttgcagatatcccaagtaattccagattcatttggaaggtttctctctcagtagcctgctctctaggtagttctcaaattctaatagacgcacagacacaaaaatctgcttggtaggtggggtttttactttttagtgacttttatcttgtgtgcctgacctggtgcagcatctggaaaagtattggtagaaaagaatattctcagtgagaaggagaaggaacaagtaaaacaatgtgaactaaaggcctggcacagtggctcacgcctgtaatcccagcactttgggaggccaaggtaggagggtggcttgaaaccaggaattcgagaccagcctaggcaacagagcgagaccctgtctctacaaaaaaaaaaaaaaaaaaaaggcaaaaaaccccccagaattagccaggtgtggtggcacatgcctatagtcccagctactcgggaggctgaggcgggaggattgcttgagcccaggagtttgaggctgccatgagctatgatcacaccactgcactccagcataaaaagcttggttatttatcttagttaaagctgtccttaaagaatttataaatggttgcaaatatttctgaaaatcatagatgtatggtttctatggttcctggttactttatccagtaaagtaacatgacagcttattttatggatagtcactagattgtaaacctttggaagttgggactgttccattcatcatcttcacattccccactgtgcaaagcacagtttgctcatttgttttgtttcatttttttccctttcaactatagttttcacatgtaaaccatcaaattataagagattaaagataatttaggatttagggtgttttgattttctagctcataaaataaggatggaagagcagtgatcagttgtggtaattgactgttatggcagaaggcaaaaaggcacagagaaaagagatagaggacaagcctgttctggttggcatcccaagtctagatcctccatctgggagcccatggctcagataatactccaggtaatcatgaattgtgggagttaaccctgtttaatgccccacaaaggaacagacctgtaggaacaccttctcctgtctgctgctgccacagagggtagcaaatcccatgctaggcgtggagaggagacttgggcatgtccctggagggacactgctgcagtcacttcacttacagagctggggaggccctgaatggtgtcagagttcacagtgcaaagcagtaattatgttgaagaatgtgacatctcaagattcaacaagttttttttttttttttgccttaaacatgaatgcctattcatagagggattataggagcaaagctctcttagatattaaacaccctgatcagaagaaaaagagaagcaaattcctgatgtcaggaaatagcagcaaatttttacagaatgcttaagcctggcacagcaatcctaagaatgttgttcagtttcatggcttttcctctcatattgggctgaatgtaacttgtccttcatttatgtaacaaaatatttgagtgcttactgtgagctaagcactttctcagtgttgggagtaaagcaacaagcaaagcaaatccctaagctttggggagatggaaaataaatatctgataaagtatatggtagtcataagagctgggaggataggagatggagtagggtgatgggtgctgttggagataatatgtcagggaagggggggtgtttagtagagggctgaagtgagggagaaggtgttccaggtgagggcacaggtgtgaatgtagaccctaatgtggaagtgtgcttgggtgggtcaaggaagtgaaccctaagaggaccactgggcagaagtggaagagctaggatagggaggtggggctgagggtgaccaggggccaagccatgcagagcctcttaggtcctgagctttctcagtggtctccccttcatctgctttggagcttgctttcctatgtggcaacattagttctagtgtgatgaatattagtgggaaaatagaaagttctatataaaacttacttctggaaactaaaggattcttgcttagacctcagatgttgatgggtggtagattaaaggccgttttctcatttgttgagctgtgccctgagatgagttttctatattcgtgtggtagagaattcattgaaacttgaatacgtgccattatgtgaggcagaagtgtatattctatgaaagggtgttgacatattgtcacataccatgagctgcttaatctgggaatatttgtaaaagtgtcatctggtgtgaaggctgatatttaactatctttaaaaaatactggaaaagacaatttgcttgcagattttagggttttgctgtgggtctgtttttgtggaaatgatttgtgttcagtagcattttttcccctacagttttcatatggtactgttttgacttgtttggaagataatttgcttggcttaaagggaattattcgaacaatcttagaagtttaaaaaattatgttagctagaaatcagaagtttttgcctttactgaaaagttcattatttattcattaatttatccatccatttatacaacaaaaagtgattcagcatgtagcgtgtagcagacagtgtgctgaagatacagcagatgtaacagatatggcttgattagtcttgctaggcagcaagagacaaacatatgcatacacttccacactaattatggtaagggctaaaacttattgaaaacagtatagtgatagggaatttggagtggggtggggagctgtgtaggatagtcagatgagacttttttttttgagacagagtcttgctctgtcgccaggctttagtgcagtggcgcaatctcagctcactgcaatccccacctcctgggttcaagcaattcccctgcctcagcctccctagcagttgggactacaggcgcgcaccagctcgcccggctaattttttgtattttagtagagacggagtttcaccgtgttggccaggatggtgtcgatttcctgacctcgtgatccgcccacctcagcctcccaaaatgctgggattacaggcgtgagccactgcgctcggcctagatgagacatttttgagaaaataacatttaagatgaggcctgaaggaaaatagtgccagccatttgaagagtgagggaaaggggtttccaggcagattcaatatattgtgcaaaggccctgaggaagtgtgtggttttagtggagagctaaagaaccatgaggcaagagcatcgggatatccaagaagtcatgctggattacatatactggtcagtaaggagcttggatttgattttactggggaaataacataatctgatatgtttaaaatgattactgaggcttctaagtagagcattacactgttaacagtagtgggagtgagaggtcaggcttggtctagggcagtgcttctcaatgtgtggtctcaggatcagccctatcagaatgacctggaaacctgtaagaaatgcatacttcaagtcttattatggacttgctgattcagaacctggaggtgggactcagcaatctgctttaacaagtcctttggatgatctgatatacagaaaagtttgagaaccactggtctagggattgctggaggagatggtaagcagtagatggattctggtgtatgttttgaaggtagggatgataggacttttgtatatgggagctgaggaaaaaggagaaatcagaaatattattattattattaatgtttcaagacggaatcccactgtcacccaggctggagtgcagtggcatgatcttggctcactgcaacctgataaggaccttgtttattgtgatgagggagactggtgggggtagcaaaaggacataacttttgaacacattgcgtttggagtgttcatgaaatgtccaagtgaagatgttggctgttgatggcaaaatgagcgtacagtccagagggaagatgtagtttcaaatacagctcagcagaaagatacagtttccagaaaggaatttgggacttgccagtgtacagggagtatttaaagcaattgaaataggtgtgatatcaccaaggagagagatagcaaggagagagggtgcaagagcgggcaaaggaccaagctggaaggaactcttgacattcacaggagcaagagccagcaaaagaacagaaagaacggccagggagagaagagaagaaaaccaggaaactggtttcatggggaaatatttcaggaacagagtgatcaactgtgcttaatttgtatgatgaagcggagatttgtagcatagagatcactaggcattctatttggactgtcagtgaaattgaaataaaaagtcaagaatcaacttgatttccatcacaggttttagattagaagaaaccagagaaacacagccccaattttctatttgctagttttccaaacagtaagttttcattgatttcactggctcccctccggctactatttgctgtgcacaaacaaagtctgaatgagcattttgtagtcctgaaaaggagtagcatatgggcttcaacagccggtcatattttcttttattactatatttaaagcaacattcaagattaaaaaaaaattcctggcaactagcataacaagctgcaataaaatcattcctggctattgatatgggctactttgtgcctcatgtcatgttattgaatccaacttcttggaattgactgtcttaatctgtcacttagcaaatttatattggtgaggaagaacaaaaacagatttataacttgcatatctcttcaagcttctgttaatatgctcaatattagaatgttctacttttagcgttttgggtcataagctatagaacattggggcttggtgagaggatatgggcatggggagaggaatgaatatttggcattatttatgtttgaaccattgagctggggtctttaggtttattatttcatttaattcccactctgacgtaggtggtatttccctcattagtagataaggaaatgagctagtaaagaaaactatttaaatccagatctaaaatggatctttattctgtgccaagctcttgggggaagagtatgtgtggaggaggagttgtggggactcacagagcagtggcaaggcaagccagagatacagcaaagggatatcaaggactaatgaggtactttaaaggagatcgagtcatggtaaggcatttaaattagttttgttagcaagtactgcatggaacaggaagactctgtacatgctcagtgtagggcttggtccgtcaagactggctaggagttttctagatagagccttgaatcttgcattacagtcactacagagcatgagctctgtggacatttcatgaaaagcttcctttctacttggatatatttttttacttcttgtgtgcatacttgatttatttactgttccttatagagctgcaaggccttgtttcttttctatagaagttatatttctctgagttcagatgtcacatcttcgttaccttctctcaagttttgctatacaagcttaggaacgtcatctctttctcttccagagttatcttccatcatgtaggctttggagccactttcctcagagcctccatttgcctcacctcttcttgcctgggaccttgtaaaaacagtgattgtggtaattaaattgagatatgaggaatatatataactattatgtagtcataataattaaaaatttaaaaaaaatgcaatgagaggggaaaaaaatctcctggattggtgagctagacaaaacttcatgttaattaacatggatgctttaatccatctattcctgagtccaggacatcaaatcttgggttctacaatgggtgccagtcttaggagggtcatatgtatttccagtcacaaaagatctttctgtcatgttggagaagacaaaagtttataagaatcagtgggccatttaaaatgataatgagcaacttaggcgtaaagccagatgtcacaggctggtggcttgcagcctgctctactgtgctttaaatacgcagtatttaaaaaattgatgttggttcccaatatttataaattgggagatatcagccataaatctagattccatcctcccccacctttaaaaaaaagaaagttggatctgggaacactaggtctatgtttgtgcttagcaggaatcggaagagctgggttgtgaccaggctctttcttttagcagtggcaagctcttttcagctttctgccatcccgaaagcaccctagtgtttctcattggccgtgatgcccatgttgactgcaatttgtcattgtcctcaaggctgtcgttttttccacagagccggctttgctctttgacaaagctactttggcctccttatacatttgagttcattgatccttagcctaaatgatcaggacatgacacattcagaagtttgtattatcttgtaaaagcacatgagcaaagtctgtctagtaagtgacattgctggtattcagaccaggatatggctgagaggaagcacatatgtaaattgaatgcatcagggatcttttggagaagtcaaacaagaattctgattacctcatcagtgatacctaaatgcagatttcttcttgcttcagacaaaatttttcaaagatactcaaagtatctcagctcttgttgtatgtgtgttttgaaagatagggttgaagaaaacaatgaaaagataacagggatatctgtcctccagagttgttcaggggattcagcatatgagaagttatttgcgaagttttagttcccagtctgggcatcagctcattatcattagtctctgatatgagttgtttaatgatgaacttgtgcaaagcacttgatcctattcagcgtcagacattcattgttaaaagaacacattgaggacactgttgtaggtcaggaaattgaaggtagggagttgagggcaagtagaagagagtttcattctggagttagttcagtaaacattgaatgctcatgatgtgtcaggctttatgctgctaccagaggcaggaagataaataagacagaacatgcagacttgaacagtacggtgtggtaagaggtgtgcccatggtactgtgcgattatagactggcgttggcccagtgcagggctagagggatgctccatggtgatgactgagttgagccttaaggcccggatgagctggccaggtagtgatgacaagagggagagggatttaaagtgtgaagttcaatttaaggaacagagatgatgcaggaagggctaagatatggaaggctttgatgaagattttggggagccagggaagaaggggagagatgatcagatttccattttgattgcagcttggtaactggattacagtgtggcagaactggaggctgggagaccaggaaggtttcaaccaagttagaaaatcatttttggtttagaagacagtgaggggctgggtgtggtggctcatgcctgtaatcctagcactttctcaggctgaggcaggaggatcacttgagctcaggagttcgagaccagcctgggcaacatagtgagacgcacccccccgcccatctctattaaaaaaaaaaaaaaaagacagatgaggatgggatctggagtggcacaagccatgatttaccccctcattaggtgagatactttttggaagtgctgaccttttgccattttgaagaaccagcttttagatgctccattatggacttagattgaggaagattgatcaattttattattttgctgctttacattttcaagaggtttttttttttttttttttttgaggaggagggaggagaagggaacttactgtaatgtaattttgctaaaagtttcccagaagtgaatcatgtttatcaagataaattgtagaaagaagaaatttgtttgcttataatattgtttctatgggaaatcattcttcaacaacaagcagcaaacttcctgggaggaggcactcagtatattcttctgcccctgaggaagttgaggattgaagtatctcccttgcttgtactctgggactagttgactctaagcctccttccagcctcctgctgtcaaaacaacttttcttctgtttattttcatataggagctgcacaactcaaatgttatgtgttatgccaggacctcagtagcaggtgggggtgaaaagccctgcacagtatttactgggaaaggattgcctgttcctgaggcactgcctccatgatagacgctccactgatgctgcagcccatgataggctaaagagattttgtgggtactaagttctattaaaatttagttcaggctgtcatcgctgttctccaggaaacctcagtacccttttaattagccccacccaggctgtgacctcaccctgatccattgtctgtacagctgccagagtgattttctgaactgcacatccaagtgtatcattctcctacttaaaatccttcagcagttccccagagctaatccatgggagtgggaaggcaagaatctgagtctcttgcaggacccgtgaggcatccgtcccccaagggagccgaagttcagtccttcctattagatctctagaaagctacgtgactggaccccattattctacactccctgaagcccacttactttaatttttgatgcttgtctttggcttttacaaattgatatgagaagccaactgtgaagttcaggtccatgttgtttgttaaaggaatcataagtctgttttgcaattcaatgctttctttaaggacctatgaatacttgttaaatgaatagttcatattctaaattgcttttagcatttagtgccaggaaaaaagaacttttctcatttaaaaatcttgtgtgcttcgtttaaagaatcaattaaaataatagggtgtttggttttttaaaaacataaattttgtttttttagagatggggaggtggtctcactctgttgcccaggctggccttgaactcctggactccaagtgatcctctcgcctcagcctcctgaatcactaggactattgtgtatttgccttttgacttttgttgccaggagcctcaaatctaaagataggtcataatagtcataaaagtagtgatgaactggaaatctgctgtttttgtctttccagcctaggagccttttccccatttactcgtttgtttacaaatattttttgagtggttgtcatgtgctgggcactgagaaagctgtagtgaataagatgggtaggcaaaaatggaagtggttcgattgtgctcatccaggtatgagataatagtggcttgggtgagtgtttgcagtgaaggtgtagagaagtgggtgagttctgaatgtatttttaaggtagaagcaagtgaatttgctgatgatcaaaagtggggaatgagggaaaaagaagaatccaggacgattcccaggttttgattaggtatgtgatactgacttttgctgaaactgagggacatgttgaggaagaagggaaggacagctgaaaacatttgggaaatgttaatttgtaatacttgttacatatccaaatggagatgtcatttagttttccagagctcagggtagagattctgtctccattccatagcaccacccaccatgcaaacatgcatacacacacacacacacacacacacacacacgcgcacacacacacacacacttcttttagggaacttctcatgtccacagcaaccatgtgattctactatggtttcagcttcttcagccacaaaagacctgatacttccgtgcctgctggcctttgtgctatagtctcctggccacagtgattagtccagggggtggacatatgacccaagagtccttcattggggtctagggaaataccgccttgaagagagaggctctctttttctgctggagagactaaatggtttacactcagatgtgattcctgctacgtggaggaagtccatctgaatagtacagattgatgaccttgcccagaaaagcagagattctacagaaatgtggaaagtcccctccctgctgtttactacactgtatcccttggaatgccagcgcttaaaggtgttaagtgagtaaaacttctttggtcaaataaatttaaagaaagaaatttcttgacagcagaacttttcagatgagcctttgtaatgaatatgcggctgggcatagtggctcatgtctgttatcccagcactttgggaggctgaggtgggtggattgcttgaccccaggagttcgagaccagcctgggcaacatcacaagaccccttctctgcaaaaaatacaaaaaatacagaaaaatcagtgatgagtgcagctgtagtccctgctacttgggaggctgaggcaggggcatcgcttgagcctggaaggtcgaggctcctgtgagccaagattgtgccactgcgctccagcctgagtgacagagcaagacactgtgtaaataaataaaaatatgttttgtgcttctttaagaggaggattagtaaacagtgttccccaaatctatttgacagtggagggtttttttttgtttttaaatgggacatctataaatatctctcagttggaacccagcttgaaatattgcttgaaatgctataacaggttgtcatttttttgtagtcatagtggggatgggtgagttgttctttatttctggcaaaactggtaggctccatataactgtcattacttcctgatgttttatagcttgttaaggagacaaaagccttttttcttctcctagtattttaacatgttagtaccagatattatctatgcttaggtatgaattttggctcagagattttctcagcatcacaccaatgataagtttcatgatcctagaatgtactttccctgtattctttctcctctgctggtgttctgtgagtccacgtgtatgtgtgtgcaggacaacacttaaagtggttattctttcttcaaagactcagttcaacacacccctggtggctgttgtagctcagggttgagtagtgatcctggtattaaagatgagaaatttgttaggtagccgctatgagctgcaaggtttcctgaggcagaggtatccggaacagagtcagggaggccatggggccagaggccttcctgattctggacacacagagtaccttggtttccccaccctaccttaaaaatatattcggattcacttataccgattaattacttagagagagtgaatgtattatagttatgtgaacttgtactccctggctgtctctcttcttatgccttggtgatttgtctagaggataaattgctttttggcttttataaattctgttttcttctaccaactgctaaccattaacatctcaatcaaatgggggaatttgcagttatcagcttaactaatctccatgcccacatttcttgcttctctccctgttactgacccagatccttgatgataactcattgtagattttgttatcatttaaaaccttttcaactaggtacttgatataatagttcttattaatttttaattaattttatattatttagtcatttgctgagttggtagatatttatcttgtgatttcttttaaaaaagtcttagttctgagatgaacctttaacagcacccttctgtggcagtctactaagcacagtgttaacctgaggtctttggaaaggccagcttctcacagatctaagggatgcaatttgctggcaaatctttagttggccagtcttgactacatctgatcaaagttgggaagtgagctgctggagacggtgacattttctgaagcatgaacagtaacaatctgaaaccataggcccttcacacctcttctgtcatttcgtctttgctaccgtccttggaaatagcctgtctttacaaaggtttctatataggttaagatacttgcttgaggtcatgcaaataagagctagtctggaggaaaaactcagtttcctgtctcttctgttcatttcactgtcctgcatggggttatgcttttttctttcaatgaagcgtaggaagtctccttgggaatcatctgtgctgatctctgtgtgtgtgttttaaattgcaatttgtgttgcaactggtaattccagttcttgtatattactaaggctttctctgtagatggatagttaatccgtgaaaatcccgaaaagcatgcagctctgttgatttgattttgttataagataaggaatgcataatcactctgggttcctggctttaaattataaggatgtgttaaattatgaaaatgaaatgaggtttctaaaaattctatattctggaaaatgctattaagcaatttccattttgatgcaatgtatatttaaaaagatatattttctgtgtatagttgtactgtttttaatctccttgtgattttcctgaagctgtgcttaaatgtgaacaattgtttaaaataaaccaataaaggagagaaataggatgaagatattttacatgttttactaattctgacatgtccccaagtgataaatggtattcagaggctgtctgtacaagaagggttcttacagtccatttctagactaatttcagagaacgcagcacctgagtggccaggtgagctgtgctcactgtggggcggcagggtgggcgctaaagccttgagtccatgctcaatgcgctttcccctgccccgtgctggcatccagatttttgtttattgtctctagtttctacatcctttgtaggcaatgaaactcaccttatatggaattgtacgtgtcttttataggaagagtatgtgtgtctaagttaatcactcctggtgggatctctgtctgctctgttactgtgttggccattgttactgctctgttactgtgctggcccaatgaaatagtctctcggccatttgactacttcagtttaggccctagattgttttgcaacttgcttcctagttcatcccccttccacccatcttccatatttccaggagaaaaaaaataaaaataaaaactttaatgtctcccccaacccccagattttaggtactgttttctgccccctgtctcgctttctagctgtttctcctctcctgtttgcatgcacccttctcattctggctttaggaactacttgctgtcttgacagtgacaggtttcatccctccatgcttgtaggttgttgcaccatcctatgaccagaataccttcctctccccatttcagccattagtactcagcttctgtatgtgcttccctaggaagtccttccagtgacagactgtactctactcacctcccctgtgagcagcctaaggcagtatggtagcgaagagtgtgggctgtggtctcaggttgcctgggttcaaacccagctcctagctgtgtgacgttggacaagtcacttaacttctttgggcttcagctctcatctctaattaatagtatttaaggttgttttagggttaaatgacttaatggatgtaaatcattcatgaaagtgcacatacgaacatcctgttgctcacaatctagtattactagcttttaagcctggaaaaccagtatgattccatttttgtaccctcaggccccttttatagtacataggacatggtaggcactcaataaatgttgcttacttgaataaatgaaacaaaaaagtcaggaaacacagaacacttattttagtgtttgttaagttatgccctgctttgttccagaaaatgatttatttcaattagggtttcagatgtaccctttaaggagcaatgtatgtatctgtaaactttatattttcctcagagtcacaagccgtttggaatttcattttgaaattctctttccactaacatttatagttttggcacagttgccctttaaaaagacagcgtatcaattgaacataaatatattgtgtttaaactatatgcctgcttgaataagtgcagtacttatttgtcagggcatatattatgttggagtatgatgtcatgaggcttaaggaaactaatgcttatcatttgttagtgcttaaaacaaagtagagatagccaaatgcatttctctacttccttattgccatacagctctccttgtaagttaataagtatcttattgcaaatcagccctgtatctgttccaaattcaaatgttgatggttgagcttccagtattttctcccatatattcacactgaataacatttcctgaggattgcataagacccatttaacatttgtgaactatgagacttctttgtacatttctgtttctttagttgtattacggtaatcgggcatatgtcttctaaccttgatgatctcacctctatataatataaggatgttgggagaaatatgaaatctagaccaactctaaaaaattgaatgtcaaggtaattgtcttgtcacacaatggtgtaaccagccaacatcctcgaacagatccgtgtccataatggcatcattgacttctgaactgtatggtggtgttctctgaaaggtgctatagagaaaacacaagtgtgaagggcgattgtgatggttgtgggtcagaggctcctcaagtggagtgaatgaggccagccaggaatgaagacaatgcagtgaatgattcttttgttgcatagtaaaatgaagtactagaaaatgttctcttaacaaagaatcatgtttggtcagagtggacgtgatatagtgaggagtttttgtaaattcttcatttagcgactaatattttggctcagttaaagatatgaaaaacattttttaacaaaaaggtgttagtggccgggcatggtgggctcactcctgtaatctggctttaggaactaactagctggttctgactagcgtatgagggtggggttaggttttccctatcttcccccttcttccatagcactttgtgaggctgaggcgggtggaccacctgaggtcgggggttcaagaccagcctggccaacatggcgaaaccccgtctctaccgaaaatacaaaaattagccaggcgtggtggcgcatgcctataatcccagctactcgagaggctgagtcaggagaatcgcttgaacccaggagtcagaggttacagtgagccgagattgcaccactgcactccagcctgggcaacagagcaagactctgtctcaaaaaaaaaaaaataaaataaaaggtggtagtataaaaaaaggggcactgtattttatagttacaaatactgagtcattaatgttacaggcgtacaatgctccacttgctatgagagtgtgctgctaagctctgtctccagaacttttgccccttggtagactctgtcttgcacaggtttcttgtcagatcatagtcctcattttctgtgcataagatggaaatagcatgcagattataccacagattgtcctagtagttcttttatatgttttactcaaaaaagctggtcctacttttttttttttttttatttcttgactagttttgttaggagaatttacacttttggtagtagttttgccattatgtcattacttatgaacaaatgtagttattgcacttactttatagagccagctcagaaaatttgatttcaatgaaattctttgtgtttagcacttttccaataagtgggccattgattcggttataacaaactattttgatgaatgagttgttctgtttatggaaggattttacacttaaatgttgcttcttgggttgtgctatttttgtactttgaaagttacataaaatgaaaagaaccagcacataagttttatatgctgagagttgaagggtgatcccattgtttctgaatttgagtctctgccagcatgaatcctcctatgagggtccctaaaggctatattatagtttcgatgaaatgtatacattctatgaatgaaaaaaatatagaatttccttttcatgattttttttcttagtttgttcccatttttgtccccatcaatataaaataaattaaaatgaccacaacaaactcaaggaggtgaaaatcaagaaattgttacctgtattatggacaggtggtgtagcgtcacctctctcatacacacccactatctccaataagcctagcctgggaaggagaatattttcctgttagctatttgagtcctcttgcgaagtcatttgaatatgtgagttctggacattgcagataactagttggttctgactagcgtatgaggttgggattagattttccctattttctctcttcttccatagtgagatttgtggagggtcaattagagtcttccttgacacaaggttatttctttaatgtagcacaggggaaggacatctttttccttttatgaattctgcccaatccttttctgggctgatctttgattcctatcatggggtctgtccagttttcagtattcttccttgtttgggtattcaggtagtagatatctcagatattcttccttgagtacaaaagtatctcccagcagtgtggccttaggcagatttgtggtctttttggctgtgctgtccagtactggaaaggataccagatagaagcttcagttctcagcagggtcaggttgcctctggctgggcagtgggtgtccagatgcagggatagtggtgtagatgcagggcagtgattaaaggctttggagtttgaatcccaaccctgctcagtgtgaccttgggcaagttacttacctgtgttaagcctcaataacctgtgccattggggcctttataaagattaatgaggtgtaatataaaatacttcacatagtcattttctggcacatactcagtacgtggtggaggttatggtgattttattaaaatagaattggctgtagatgcccctccccactttccaagatcccaacatcatgcctagtctgcctgcattgttgtcgagcatgaagaaataatcgattttgtaatttattcggctccttattacttttccattcttgcagatccattgcccatatccttaagatgttttctttaagccttaccctagtcagagactattttctaaatagaactaaaagagaaatttgattgagcatctgaatctgaccttctccccaattaacccagttgggcagaccttcatttagagtgtcatttatttttcaagccacgtggtaaggaagcagagggttctccttacttctaaagtcaatttccattaaaaccttcagtgttcagtgtgtagcttaatgccttttaaaatgattgctatttttgaaccagtgtttttgtcacaacgttttgagtgtagaatattccttatttgacaaccctgagcttgtaggagtttataaatggctaagaacaatctgattagaatgtattgcttttggttggaggccaagaatattggatcattggtttagggtatgacacttaaagagaccaaagagcagagtacataatgcccagataggccaattcatgtagctttgttccataatgtaagattgaaccccaaaccctggccacctatctttgagatatatgctgttggccacaggagcattaattactccgggcagatcagcagaccatgaactacatgctacgaggggaaatccaaatgcctcaatgtacaggatagtgggtcagtagaagaaacctcacaaaggaaagctggagaaggctgtcaatgaaggtttttttttttttttttttttttttttaagtcgtgtaagaattgctaagtgacagatcagagtccagaagacaggaaaggagttaggaaattctgagatatttaaattctgaccatgtaataaatgattcccttgtggaagataaggggtaagtaccaaaaggaaggagtgtcacaatgtggcagttttctaatgaacttaggtcttaaaaggaagcacacacaagatagaaggctcacaatcaggagggactggcagtgatcttagctcatgttaatatactgtgtgtcaggcagtgttctaagcactcacatccttgtttgatctcatgataaccttatgaagtagatggtattattattgcccttttacagaggcgtaaacgggaggctttgggcgtttaggtatttgctgtcatttacatagctagttaagtaactgcgctgggatttaagttgaggtagtcagattccagagagatctgagacttgcagaaggtgccagagacaataaaaaaaagtagttgaaagaagtgttcagagtcataaggaaagaatatatttgcatctgagtggaactgatggtggctgtgggtagtcatagagcatagccttttaactcctgttgtctatctatcttttatatatagaaaactcagaatgccggctgagcatggtggctcatgcctataatcccagcactttgggaggctgaggcgggtggatcacctgaggtcaggagttcaagaccagccaggccaacatggtgaaacacagtctctactaaaaatacaaaaattagcgtggtgcacacgcctgtagtcccagctacttgggagggtgaagcaggagaatcacttgaacctgcagggcagaggttgcagtgagctgagattgtgccgctgctccagcctgggcaatagagcgagactctgtctcaaaacaacagcaacaacaacagaaaactcagaatgtcaaaaatatgttggagaagtaataagacagacatagtttttctaactgaatttaagcctcttagcccgacagaatttctccacagggttctgagaacattttggatccagattgttcaaccaagtccatgatgatctgtgaggaagcatggagaacagaaataacactggaaaggcggaggagggggcacaggtgcactttggtgcggaaaagtttgggaagcattgtttgaaagaagttgatatctttaaatattcagggctagttgctagcaacttactatggctagttgttgaaagctgcagtgagtctgttcattagctagtgggcagcccacatttagaagaatgtaggtgtgagatgggagagactttggcataagaatggttcagatggaatgggaacaccagggggtgattcgatcattaagctttcctctgagaatgtgatttggtatctttgaaactaggccagagatttatttggatctttggttttccatttgtgaagaggtcatttagtctcatttccagatgaagaaatttgggttcagagaggatgggagtgactttccctaagccactgagctgtttggtgaccaaggcaggctggatgctcacctgctttctcgctgctctcttcttactgcagctcacctgtggacttgtggactgggccatcaggagtctctaggaggcagcattgattttgggataggcctacctgggttcaaatcccagctctgacacttaatctgtaacagtgttacattattctgaggattagtgaaaagggaacacttagcatataggaagggctaagtgtatgttcttgcctctttctagttaggcttgaaatctttctttattttatgtacttattattactaagttttctagcacctcccaactcatgaccaaaaagtttcattttcatcttatttttctctttggatgatttttataagggtatttcttatagtttctctatatttaaatactttatactgtctagggtatttaggcaaaggattcaactacagggcttttagaaatcctttccagctctaaaattataggatttaattgtttttgaaaaagatgccttctaccttcctcctcctccagctgcacacgtagtttactggttactgtggtaactgcactctaataatcctgtcaggaaatctgatgcaactatctgtctaatcttattttccagacacaaaacaagcacacggcttccttctaagaatccttctaaagcgctccagcctaagcattgtttcttcttgttctgatgttttttaagattgcacttagagaagaatgcacctcattgggtgtttcctcaatgtggaatgttttatagtatccagtgaccagtgcatcactctaaagcggtgtgtgttttcatgcactctcctggagttgatgaaattttgggtagtttgaattataattttaaaaaatgcagaatagggattagagaggatttaaatttattttgcacatagaggattgaacgtaattactcagagagttagctaaaatcagtatttttgcttttttttttttttttggacaagccagttttacaaaatgtccctctgctgatccatgaacaagggataagtctgtaccttttcatcctccctcccttcttcagccattcaccttccttagtaggggtcaagtgggatccctgtgatgctactcctggcaaggaacctctgtactcccagcctctccaccaatctctacttgaccctcagaagcaatctcatcacacgtcttattcccgtttatgtcagtcaccataggaagcctggactcccgtgtcatctctcactcctgtgtcctgatcctcatttgcctctttacttcagcttttccaatcctgcttccctcccctagggaactcatgaagccccttcactgtgcagtttgtgtgctcaccatcagtcatcagcaaaccccccacttcctcaccttgtctgggagcatgaccttcatctccttgctttattggacacttgggtctctcctggcagtactgcccctccttcagctgtctcaagtggccaccctttttcatctttcccgtacaccatgggtagagctggggtagcctcgtctatgctattttcatagtgctgctcctccttctcctgaaacgccacctcctctgactttcaggtctctgcatggcccactttgcctccttgtcactagtcctctgctcttccacgtggtcattcccctctttctttgaaaaattttgtttctggttcactgtccctgtctccaacactacttctgtgagttctccaggatttcagtccccatgttcactccatcccacggtcatatcttgatcctctcatcaccggtgacttcagtgcctccatcactcactttgaaacatcccactcttatcaccacttcctcttctctcgcaagcctcatgtggtacctccaacctcaatagtccattgatccaccaggtttttcagtccattgaatccatcacgtcttcacggacccacactcaccccatgtcctcacttctccccttccccagcttggagtccacgatcaaccactgtaatctctaccatggcatagatccttatcacccttgacccctcaggcttggtcattcttgcttgactaaatcacagttctggttaaatccttccctctcttcacctgttctgtgcttgcacccatgaggccaaatgtgcttggagaataccacagcaccatattgtttgtctcactctaagctgatcacagatcttaagtgggcccttgatgctacctggcagtctcattgtgtttccactgtctcttcattcccaccactctctcagacaactgttgcatactttctacttgctgttcaaacatccatggtctccttacacttggttgtttcctttttcaccagaaaccccagaaataatcagtagagactgccaccagcacacccaccacctgcctgcgtctgtgcccatgctcccacctccttgggcatgatgttctatctccatctacacgtaccttctcaaggacattgctgtatgaaattttccctccctttcctatgtcatctattttcttctttctacctgattcccactggcatatgagttattatttttcttattaaataaaaacatcctctcttgactctgatttctcttccagctactagccagtttcttttcttgcttttactgcagaacgtttgaatgagtcatctgtatgcattaggtctaacatctcccctcccattctatcctgagcccatcacagtcaagtttgcaccttaactcaccgtacttcactggcattgtgcttttcggggccacgggtagcatttccttgccgaagcccatggtcaggacccactcccttcttacttcatttaccagcagcatttaacagtcagtaagtcccctccatgaaatacattctttacaggactgcttggacacacatgcacctcatttttttggttttcctggtctttctcagtctcctttgctaattccttatcgctccaaactctaagcaaagtgtttcagggtacttgttcctcatcgtgtctactctcagtgctttaaatatcacctgtaagatgacttctgcattcgtatttgtagcctggatctctctcttgaactccagaccccttcatctggctgcctgctggacatctctcctgggatgcgtctaacaggcatttcaaaacataacatgcccaatctccaatctgcttcctccacagtcattcccatctcagttaatagcatcctgctcttccacttacttaagagaagacatttggtgtcattcttttcttttatttcttttttgagacagagtctccctctgttgcccaggcttgagtgcagtggcgtgatttccgctcactgcaacctccacctcccaggttcatgcagttattgtgcctcagcctcctgagtagctgggcttacaggtgcctgccaccacgcccaactaatttttgtatttttagtagagatggggtttcgccatgttggctaggctggtctcaaactcctgacctcaagtgatctgaccaccttggtctcccaaagtgctgggattacaggtgtgagccactgcgcccagtctggtgtcattcttgatttctctttctcacataccccatcagcaaatcctataggctctatcttcaaaacgtatccagagttgatttcttatcacctttattgctatcaccctggtctaagctgccataatttttcacctggattaggagagtatctttctaactggtctttcagcttccagccttatccccttcagtctgttatcagctgtgtgcagattacgtcactcttcttcccatctcattcagagtaaaactgaagtgtttaccgtgactgacaagctgtggtgtgccctagccctccattaccctctggcttcatctcccacttcccgcccacttgcttccttgtttccccctctggtcttgctgtttcttgaaacagtccaggcctgagtctacctcagagctttttgcatttgttcttccctctgcctggaattcccttcagcttcctgtcctttatccatgtcctcatgatcccttatcccactccctcacttccttcaggtctttcttcaaatgtcactttttcagtgaggacttccctggccaccaatcttaactttccacacccctcctgacactttctgtctcctttgcctaatttattattctagtatttagcataatctaatagagtatatgttttgttgatttatcttattccttgtctcttttctctcctactggagtgtaagttccacaaggccagggacctttgttttgctcattgcttattcctggggactagggcgtagtttgtgtcatggtagggtgtcataagtatttgtttaagagaaaaataactatttctggctctaggcacattttggcttaaagtcactgtaaatctgcttgccacaatgcactaataaagctaattattttatttcatgttccctcttaaagtatatttattacaggtgtcaaattaatttaaaagcataatattaggcatgagagaatacaaatagagaagagttcctgcagcttttcatgctgctttaagtgagtcccattcatggtacagttctctctacatgcatttagaaatatgtcagcttatttatttaaatgtatcttgccttattagaaaaacaaaaaagatttaagggggctgtttggaaatgtgatgatgtaaggatggggcaacttaacatgctgtttcaaatgtttagaccgtacattattgatgtcaataatctcctctctaagaggcactgatatctgtctattgtgcagtttgcagcattccatgccaaagcttttgtatttattacttcagttctacctctcttgtttgggaaataatatctccagtcctctaaatgtaagctaatttatattataggcaaaaagcaattgaatggcagtttctcaaagtcaagttaatcacaactacctaaatttagccatgtgatattttaccaacagcccattgatctcctgccccactggctattgcatgtaactataaagcaaaggacagaacccaggcttgtgcactctggtttttctcttagtattttctggtttcccttagtgtcatagttaaccagagtgaagaagattcagagcaattcatatttctgcttcctagtaagttttcaaaaacatttcatttaaagaaatactgtgaaattaacatttttgagtggggtatggttctttgaatttttgaaagatcattttacttggaaattattttagatatatgaaagaatggcaaaggtagtttagaaagttcccatataccctttactcagctttccctaatgttaacatcttatttaactgtagtaaatggattaaaactgagaaatcaacagtaatacaatactattaactaaactgcagactttatgtagatttttaccagtttgtccactaatgtcctttttccatttcaggttctcatccaggatatcatgttttacttattcatttgtcttttagtcttacaatcagtagtagcaccactttcaaacttacatggatagagaaaggaggttaagttaatgctgtggtgaagtcatgagagtgtacagtaagtcctcacttaatgtcatcgatagggtcttggaagctgtgactttaagtgaaacatcatgtaaagaaaccagtttggccacaggctcattgatataaacaacaattaagttcctactgcagatttctagttacaaaagatcatcaaacttctatacaaacacttaaagcacttcttttctttttttttgagatggagtctcactctagggtggagtgcaatggtgcgatcttggcccactgcaacctccgcctcccgggttcaatcgattctcctgcctcagtctcccgagtagctgggattacaggcatgcgccaccacagccggctaattttgtatttttagtagagatggggtttcaccatgttgggcaggctggtctcgaactcctggcctctggtgatccaccctcctcggcctcccaaagtgttgggattacaggcgtgagccactgtgccttgctgttaaacgcgcttctaatcttaaacatagaaataaatgtgagttatacacacatttaagaaagagcaataggctgggcgtgatggctcacgcctgtaatctgagcactttgggaggccgagctgggcggatcacgaggtcaggagatccagaccatcctggccaacatggtgaaaccccatctctactaaaaatacaaaaattagctgggcgtggctgcgtgtgcctgtaatcccagctattcaggaggctgaggcaggagaatcacttgaactcgggaggcagaggttgcagtgagccgagatcgtgcctctgcactccagcctggtgacagagctagactctgtcttaaaaaaataaaaaataaaaataaaaaaatgaaaacaagataattatccaatttttggtgaatcagtgagtgatagcagtcatcttggtgatgggttaaatcaaggagtaaatgtttgcaaagtgaaaattgtagagtcctccctaccatcacgcgttttaaaaacaaatatagtgagcttgctgagtgcttttgtacctcatctttattgttatgtatttgtatgattattgtctacttggtgaatttaaatttgacagtaatttgtattaattccttccttccttcattcatttttcaacttgcttgctttagttcagggttgaaggtggctggagcgtatcctggcaggcagggcgcaaggtgggaaccaactctggacagggctccattccactgcagggtgcacatacacatgcacacacgcattctctcaatcagactgggacagttaggcatgccagtgaacctaatgtgcatggctttgcaatgtaggaggaaacagaaacctggaaaaactcactcagacatggcgaaaacatgcaaactctacaccagacagtggtcccagtcaggaattgatttctttttcttctcatcagtgttattaaccaaatgaaatgacattattcacggacctgctgtataggtttaaggcagatagactgttgggactgggagacattctgatccaggggctacagacgggtggccctgtggggctcatatactgttggaaatgtgatttgaatttgccaaaatttaatgactaaaaggttttccagaaaaatttatgtttgtggcttctctttaaaagattggtagttcccactgcctgaggcctgtgtttaccaccagggatgatcacatggccctgaggcggcccttcaccatgggcaaggatcccaccctcccaatactgccctgatctaaaccagtcccctcattttttttttttttttttttttgagatggagtcttgttctgtggccaggctggagtacagtggtacaatttcggctcactgcaacctccaactccctggttcaagctattctcctgcctcaggctcccgagtagctgggattacaggcacatgccaccacgcccagctaatttttgtaattttagtagagatggggtttcaccatgttggccaagatggtctcgatctcctgacctcgtgatccgcccgccttagcctcctaaagtgctgggattacaggtgtgagccaccacgtccagcctccaccagccccctcatttgataaatggaaatgcctcgggggaccagcacagtggcagaaagccacctcgccttgtctggcctttgtctgctcctctcggtctaagagagagctgggcaggcatggttttggcttctttgggcagcaaagatgatagctgaaagaggatgcagtattaactcccctccaggtctaggcctattcttagtatttttgcttgtgtccctcaaatactagagtttgcagactggtgcccggggctgcatttgctttgtagtcccttcctgtttacctgtatgtggttatctaaagtcttatagttactaatggtaaaaatcaagtgataagcctgaaaatccagatttgtgacttattttgataaatcagatgacctgcagcactggggccaccgtctcaccaggcatgggctcctgggctggggtcaaggctgcctcctcagatgggcacaggctcatttggccctttattctcgtttttggggcccgcctgggttcctgtgggcatttgagtttgcagtgtttgcctcaagttattaggttgaaaatcagagaagccccagtagtttcctgtttgtgtttcttgataatagttattcttgacaaggagttattgaagtaattcctttaaagttcttgaggagagagggaatttggaacagggacttgtaatagaatctgagatgaggtttgccaaaagtcagccatctgatttttgtcttctgtgcccctactggctctccctggatgtgctgtcagttcccttcatgtaacctaaggtttaatgatagacagatattagcttagagtattcccccttttggggcatttttgtttaaacacaacttgaagcacagtatatttaaagaattgagtgtaagctaccatggtggaatttcaggcattcattggatggtatccctgtaatttcatcccagaagtgtgtaagcatagaaacgagagtagagcactccctctttggatcattatagaaacatggaagagattattaaaggggtgttgtatgtatgtgtaactcttaagggtctagatctttgtggccctctatggtagctgctagtcacatatggccaccgagcacttgaaatatgctagtctacattgagatgtgctgtgagtataaaatacactctagatttcaaagacctactgtgaaacaaaggatgtaaaatgtctcattaataattttttatattgattacatgcttaaaggataatgttttggatatatgaggttaaataaaatattattaaaggtactttcatctttttaaaatatgtggctacaagaaaatttaaacttccacacacagcacatattctgtttctattggacagagctgctctagattctgctgtatttgatggtaagaaagggtgagcagcctgttgtctagatcttggtaaaccaaagtacaaagaacaaatgtggagagactgaaaatcgtaaattgttttcacacctcttgcctttaataaagtttattcttaactgctcactttacggtttttggtgcatttagttggatgcgaggttgccttttcacttccttcattgtattcatggtgtggcagtgttacacaatggttcagaacaagggacttgaagtcaaacagttgctacttggaattccagcccagctacttgaccttgggtcaattattttaacctccctgagcctcgttgtcctcctctataaataatggacgatgatgatgcaccccagtgaatgacgattgtggaaaataacatatgtaaagtgcccagtgttatgattattattcctgacaatatgaaaaaaaaaatcttattcagcacttctctgtgctaggagttaagtctgcccccaaaatcaggaaacggctcctttttgcttctgtggtgtgatactgggtctatcagaaaccatttaaaataaatagattttttttctattcactagtttcatggcataggtttttattgtatcagtctctttttgttcctgatgttcaatatttatcaaaacccagcaaggactaaatgtttaagaaaacgtttggcaccttgaattctcacagaagttgaaaacatgtattggatacagtaaaaaaaaaaaaaaaagtattcatctataggtgactacataaatgaccccagataacaggaactggacaatggaggatgggagcagtcacaaaaaccatgccatggggaccatcaacctggtcatcttgctctttctctttgtggttttcaggtacttgtaggatactttttttttttttttgaggtgaggctaaacttttattatgtgtcttccagcttttattatgtgctgtggaacttattaaacttaatatatgactaatgtatataactcaggggaacgtctgtgtaagttaactactagagaaaccttgacaggaaaaatatgaagatagttttgagtggactttatcattctcccttgatcataaaagaattgagacttggaagctgggaacttgggactcagaaggcccactggtggcctgctaacatgtaagagtgcacagattggtaaatgttttttaaagcttatttattttctctgtgtctatgaaagacactacgggtgtcattctctgcttcacactcatgtctcttgtactaaatagaaggcaagtcttatatttcccacttcctgctactttgcttggcagtgacttttcaaataattaaaaaaactgtcttgctggagtagctctctcttacccatggacagtcttgttatatccaaatcagtcagatagtatatgtaagaatgctttgtgagctaaagtcacttaataactacagtcttattactaacctgaccatggctgctggccatgaagctcacttgatttcatccacaggttccagtcaacccctcctgccactacctgttgtaggtgtggatggtgtttctgtgtgtcttctcctgccgccctgcctggatctcagctgctatcttttggccatcacaagcctggctttacccaccaactgtaggtcctggctgtcctgctcaggatatgacagctgctctctagtaagaattctctgattcctgatagatgacccctcttcgtaaattatgattatcttaaataatatgatatctataattgtaataatagaagctaacaactgattgcttactgtgtgctagatgctcttgtaattgatttgttctcttttgagtctcaacaatcctaggagagatgtgttattatccctattattcagatgataaaactgaggtgcagacagggtaaatgctgtcccaaagtctcagattagaacccaggtctatcagagtaggtcttgaggttttaacagtgcttgttttctgatctttgtttatgttgttttcctgatctcttgccatgtgtctaaatatttctagtcttcaaacacaagttctacctctgaagtgacattttcattaaggactctaggctgcatgttatgtgctcttatccccattgctctgagccagctgaaggatgtcttgcttgtctctatggcttagctagccttttataatgtatttttttctgattgtttcttgtgcatcaatcttgattttccaaattttattgttagtacttctaagatgagggcactttgtacgtttctcttagattcttcaacatacttagcatggtagtgagtaagctcattaagaaaaatttatgaactagacatttaagaaacagacatagagaatttgctactgacagtgtctattggctgaccctgtaccattcactacccttttcattttagcttctggagggattagtctaagagtgcttctccgttagaagaagttttgccctgcaggggacatttggcagtgtctagagacagatattttggattttcacaactaggaatggggtgctactggcatctatggggtagaggccagggattctgataatgcacagataaaaatagataatccacagataagaatattgtctggttccaaatgttgatagtgccaaggctgagaaactctggactagaggtagcaatatgatatgttctggtcaattaaatataagtggaagggtctgctgtggctttcttttcttttttgggacagtattttgtctgtcacctaggctagggtgcagtgatgtgatcatagctcactgcagcctgcagttcctggactcaagtgatcctcctgcctcagcttccgagtagctgggactatagttgcgtagcaccacacttgactaattaaatttttttttttttttttttttttttttttgtggagacagggccttgctatattgcccaacatggtcttgaactcctggcctcaagtgatcctccctccttggcttcccaaagtgctgggattacaggagtgagccaccgtacttgccctgctgtggctttctaggaaaattatgcttccatgagagaggattgccccttcatgttttcagcttcttctgctttcaacatgagcttgaacctggaggtagaatatccatgcatcttgtgaccaagagggaacaaacatgaagataaaagtcagcatgctaagggtggtgaagtgaaaagataaaaaatgtttgagttttcttttacttgtaaccaaacacattcctgagctaatagaccacagaaacttgagttgggaaggaattaagcccagcctgacctcatcgaagacttttccaacgtttctggtgacataatccactgctttgggagggagtctaattttgttgcagatctatatccattccaacagttctctcttacagtgagtgaaatttgacccccaaaacttctgcttatagacccagtgtgatgctgacctgagagtcacctggacagtcactcccacactttcatagatgtcagtgaaaagtcatcctgatcaagctggcgagtctactgacagagaccctcttccaaatattctggagggatgtacatctagaatgtaataccctctccttgggtagctctttagagccacagtccaaaggtgaggccattaataaaataaaaagatgtgacctctgggacccccaagccctttggtttcctacataggactttagagtcaacataaatatactagaagcttctgatattataaccacatgaatgagccaagaaggaactctcagtggcttgactgcccttaatctttcctctatgtcttgggctagacaccaggaatactactttcctcctgattacctttattttcaatccagtttacaaataactaagtgcctcaaaacccctcagagtaaggacaggtggctcatgtctgtaatcccagcactttgggaggctgaggctggaggatcgctttaggccaggagtttaagactagcctgggaaacatagggagactctgtctttatgaaaaaagaaaaaaaattaattgggtgtggtggtgtgcacctgctactgcgtagcagtccagagtagttgcgtagtcccagctactctggaggttgaggcgggaggatcacttgaacccagcaatttaaggctgcagtgagttatgatcgcaccactgcaacccagcctgggtgacagagcaagaccctgtttggaaaaagaaaaataaacaaccaaccaaccaaagaaacctctcagaataaatgcctgagagctgtttctgctaaatatctttcaatttaaaattttttaattctggtaaaaagagaaaaccacatgaaatttgtcatcttaaccatttttaattgtgcagttcagtaaagtatattgacattactgtgccacagatctctggaacttttccgtcttgtctgctgactatcttttatggcagtgtagggtgagccatgtctttacacagttgttcattcactgcttgccctgctacttacactcctcctgcaaaatgcccctagcttatagtacaagaaagaggtttctttggctggactttcctccttctaagacttcttttttttttttttttttgagacggagtttcgctctgtcgcccaggccggactgcggactgcagtggcacaatctcggctcactgcaagctccgcttcccgggttcacgccattctcctgcctcagcctcccgagtagctgggactacaggctcccgccactgcgcccggctaattttttgtatttttagtagagacagggtttcaccttgttagccaggatggtctcgatctcctgacctcatgatccacccgcctcggcctcccaaagtgctgggattacaggcgtgagccaccgcgcccggtcctccttctaagacttctgtgtcagccattcagtgagtttgctcaagtcctcttacagtccttaccatttcattagttgaatgcttaagtagaaatgggtttaaaaaaccagagatttggtttaaagagagggaatatctgggagcagcaaggattctaggtgggtagggtgtaaacctcaccaagtaactcagctgaaaatactttctcaatttagtacaaggtcccagcacggaaagatgtacaaggttatttttcctggcgcttctcccttccgtatagcccatatgttagtgcccttagttcttaatgccctctggcagccaagttcttatcttggggagctacatcacaggtgttgggtgctgtttaattttcagctaattgagcttttttgctgctagagtcttgtatggtgttttcttgaattcatgaattagtcattaatttgtgtttagcaggcaggcaccctggcagtctgtggtctgtccagcagaccttcttttggactggacggatgctctttgtgcagtttttagtgaatgatggtgggaaaaacagaatcctcttccagaacccttaaacggcagccttttctttacttccagctcttaccttgcaggtgggtgtgggtcttaacttcagaatggctacttttagtggggttaactattggggtaggatggagactgtgttctgaggctcagcagaagtcattgtgttttttttttttttttggcactctgtaaggtttgaggaaattctgtgatttgaatgaattttttctcaggaggatttacttctaaaataaacgtaattaattagataactggaatttcctaccacttagatggttgttgtcaggttctgtttccttgctacaatttgaaagcacttgaaatttcagattcatgaatttataccacaaaaactcaaaacagttgaaaagtacatagatgctcatgcctgtaagcccagcactttgggaggccgagatgggcagatcacttgaggccgggagttcgagaccaccctggccaacatggcaaaacctcatctctagtaaaaatgcaaaaaaattagccggatgtgttggtacatgcttgtaatctcagctacttggaaggttcaggcatgagaatcacttgaacctgggaagcagaggttgcagtgaaccaagattgtgccactgcactctagcctaggggacagagtgaaattttgtgtcaaaaagaaaacaaaaataaaaaaacacatttttttgagtgttatggagttatgattccaattctttaattttaataagccttgaaaagctgcagtttactccatcatgagtagggataagcttctcagtataaacaacctgtagttctgtggttaatgaaataagaagcttgaactactttcttaagttaaaagtgccttttcagcaagtagatgctcaatgaagttagcacacctatttcaactttaatcaataaggtggaaataatgcagtatggcaggtacattactttcagttgcattttctaggtgtgattatctcagagtttgaaatcgtacattttatgattttatgttagtgcaggatgaatcttttcagttataactgagctggctgtgagcatttagcctgacaggttgggctgcttttcttactggttttgtccgtataaggagtaccacagaagtacctcacacgcattttaaaataacttttcggtaataaaaattaatattggttaagaataaacttagcttatctaatgcgtgggccaaccatttctgagcaaaattgtgagcagagtttgtcttgtgtgttggctgtggtcttaaaaacactagcagacagtgttatgttgactgtaatatttcttctgtagagtaaaagatagatttcatttctgggtgaagcattgtaattggcttatacttttgtttctggtcatattatgtagacagtagaaaagaagtgggaatataaaggtaggagaggtattacttgaatgtgacgcataaaaagtatataagtagacagaaaagaagtgggaatatacaggtaggagaagcattacttttatgtgatgcataaaaaatatatagagttttctattgttttgggggtggggttagaaaacatgctatagataaagaagagtcaaaattagaaaattaagtaagatgtttcctgttatacttaaacattgcaatacttacaaagcatatcataaggtatatataaagtggtcattatgaactttctttacccaggtcaagcaacgcctctaagggggaaaaataatttggtgaatccccatactctatgatagggcatatagagccattttattataaagaagtgatatattgctgaagtgagtactaagtagcaagcagtggaaatgtgtaccatgcatttctgagaaataatgcctgggaatgcactgcaaaacaggtgtacttggtgtatatgcaatttaagtaacataacaacttgagaaggattcaaagatgggaatagctatcatgtgaatgaaggcattgcactgtagaaatatcttactataacaattttattatatgatcattgtggccaagaatactgatcatttagcttagttttagaagctaaatatgaagtatcatcattctatgtacaatgtattctgtggtggttgtgcatttattattgggatcacagcgtgtcttttttctgccaagatggacactgggcaccatggtcacaggcttcttgggtgctactaatagaaggctctctcttggctttctctgttgggcagaagtctgtgaatgccattatagctaagactctcccattctggccaggaaaggaagctggaaggacttggactcactgatttgtgctgacacccattcagccctgccgttggaactctttaatgtgcttttcagtgagctagtgtttcagaacctcatgacagggcaggctgatttctcagatgcatacttctctgacctctggcttcccctagctcactgaggctcgttctgcctgttgatgaggctctcctggcagatttgacactggacccaagagggcagaagaatcagctgttaagctggtacagggctcaaagataaataagaagacactcagcagagcgtaactttgaggcaggcacacaaccacttgggtcagtgtagtatttggggcatgtgggtttgtgtttggaatttgagaggaagcactctgatgatccagcagcctttgtgctccagtgacatgctaatttttttttcctgatattgggattgcgttcccttgactattgcagcagagaaactgaaatgggaatcatttcctgtgggtgcactgatgtgcacagtgggcggaaccgggaaggcaagtcagaggcatttttctcatttctgaatccatgagtctggcttttcccttagggtatttgggccaattgttatagtgtgtcccactgtgtaaattgaaggtttagccaagtctggctgaatggtttagtcttgcaaaaactaaagcactttgtttttaaaaaaggaaaaaaaagtttaactttttttatttttaacatggcattattggactaaatgatgttaggcatgttaacagagtaaaagggagaacttctttctgcagtttggcaggcctgtcacttcacaggtgtatcactgtccaaatgagggatgccagataagacatcattcagcctcccggaggggtgggggagcaggtgtggcacaatacagtcattgttcattgtcttcccgcttacagtattgtaaaacctgcactgcattaaaaatcctattaatagaacattggattaggaagaatacttaggcttctccctccttccatcagttttaaaaggaatttagaaaaatcactatttcttgtatgtatgagtgggggagggaaagaaggaagaaaagagagactgactttgtctttgaaatacagaagagaacatcttgcagtgaggaatgagaatctaaaaagataaccaggcttcttgtaagaaaactttcatagacagttattcagcaggcagatttttaattttcatgtttccagcttgtttagtctgtggggactttgatttctggaagcccactgggatcgctgctaaaccttacatactttttttgttgtatcaaattcagttcaactaccagaaaattttttttggcaattatttttttctctgtcatgttttctgtccaatgagaggagaagactgggatagccaaggcaaatgctgctcaaattattgtgcccaagaggagagatttggccctgtgatactgcagggggactgttgagaaagagtaacagggacatattgggaagtgtgcagcctgggcttcccaactgatgtcttagctaatttgaaatgttgtgattagaccttcccttattcacgttgaggaatgaatatgctgacagccatatgcatgtgattttaggattattaagtgtaatggaatgtccaaaccatcactcagttttacatagcacccttcaagaactagaatgcctgggaaacatggctgtcccagttaagttgaggttttatctgaaacccattttgttttcaaacatgttggaaatgttcctaaaaatgcctgagtgtgctttgggggtgtgcttggtgagtatgctttcctacccttgagtgtttgagacttgttttcattatgttaggggcttatgataaagtcttcattttcagatctttatgtagaagatatatataattgagcagattttgaagtttcgctcaaatcttgtttgtatttaagaatactttttcttattcattattctgattaatttttcttttaaaactggcaacattttgcaggtagtttatggttttgcaaattagaatatgggtcattcctctaaatagaaacagtgtttttggtcttgatgggtctgtgaattaggtgaaactagttttatctttctccttctacttctaggggaaagtctttacctttccccccctgcacactcctcccaccccacccttccaagcttgatctcagcaaattcattgacttccaaaattcatttatatgactttaatcttaagtcatctttatgaaaatggcttatctttaacttactacctgtttcaggaatagttgcaggcagagcttttttcttatttttcttggtatgaaaggctttgtatcctgctaaaggaatttcaggatttatagttataagtagctatatttttagtcatgagctttgctatggtttgaaagtgtccgccaaatttcatgtgttggaaacttaatccccaaatccatatgttggttgcatttggaggtggggcctgtgggatgtaataagggttaaataaggtcatcaggggggttcccattgatgttacaggtggctttataagaagagagacctgagctagcatgctcttgctctctcaccgtatgatgctctctactatgttatgacatagcgggaaggccctcgccagatgcagactcttgagtttgaacttttcagcctccagaactgtaagaaatacatttctttttcaggacccataagacagagcaaaaaataaaaagaaaaaaagaaattaaaaaaagaaagaaaaaattttaaaaaattcttttgaaaaataaattacacagtctgtgatactgtgttatagcaacagaaaatgaactaaggcgggttcccagaacctttataatcacatcagcttgttaactgctgttccacttgtaagcagctccccctcaggccagatattactggcataagtggaaaacctaggcacctgaaagtttctgacagcctttcagaaagttccagaaaggagtgcctttgttttcctcactaagtgagagattaaaaaagaaaatcagtaaaagtcacttcccctaatgcctacagttgtcatcctggaatcacacttttattgaatccaattcagcaaacatttatcgaagaccagctatgtatagttaaaaccactacacgggccgggcgtggtggctcatgcctgtaatcccagtactttgggaggccgaggtgggtggatcacctgaggtccggagtttgagaccagtctggacaacatggtaaaaccctgtctctactaaaattacaaaattatctgggcatggtggcacatgcctgtaatcccagctaattgggaggctgaggcaggggaatcacttgaacccaggaggtggaggttgaggtgagctgagatcgtgctattgcactccagcctgggaaacagagactccgtctcaaaaacaaaacaaaacaaaacaaaaaaaccactacacgagctgtagaaaagcccatttgtttctcttctaaagtatataatggggctgggcacagtggctcacacctgtaatttccacactttgggaggccaaggcaggcacatcacctgaggtcaggagtttgaaaccagcctggccaacatggtgaaacctcgtctctactaaaaatagaaaaattagctgggcatgatggcacatgcctgtaatcccagctactctgggggctgaagcatgagaattgtctgaacctgggaggcggaggttgcagtgagccgagattgcaccactgcaccccagcctgggtgacagagtgagactctgtctccaaaacaaagaaagaaaagaaagaaagaaagcacacagtgggtgaagaaagtactcactactcaggtagtgagtacctgaccaatgtagaatgacttttaaaattccagacttgggagcatttctcaggatgccagtaggtattaaaaattatttttgaccaagtaaatttggagaaagatgggttaagtgaagttggatagggattttcttttttatcggtgcttccaaagggggatggtatatgcagcatttcccaaatttatttgaccagggaccatgtatttatttatttaggagcagctcagaggactagtgttccatggagaacactgtgacaaaggctgttctacaccacggaagatttttttcctctctctcttttagagggctcttttattttggtgtatacatgtttattattcagagccagcaaactctgtaactttctccattggttatataaaaagtgttagcattttccttggatatttgtgaggttttgaagggccgggataatgaccgttgagtgagctcttacttggtgccagctacattgctgagcatttcctctagagtctcattagtgggaagtacaaattagcagttctgctttttaggtgagaggataacttgaccaatatgcaatttatgcatcatttccaacatgccagacattttaaggtgaagagattttaaaaatcatgtatagttttatatatagattcatatatagttgtaagaagttatacagagtgattctgtgtccctttcacccagtttctcccaatggtaacgtgttgcctaacagtattacagtatcacaatcaggcagttaacactgattcagtgatcaacactttaacactttttagatttttttcttcctttctctcttctcttctctctcgtttctttctttttttgagacagggtctcgctctgttgcccaggctggactacagtagcaatatcatggttcagcacagccttgacctcctgggttcaagcgatcctccctcctcagcctcccatgtagctagctatgaccacaggcatgcactaccatacccataatttaaaaaaaaatgtgtagagatggggtctcactatgttgcctcggctggtcttgaactcctgggctcaagtgaccctcctgcctggcctcccagagtgttgggattacagacatgagccaccatgccctgccattttttagatttcataggttttacacacattctttttgtgtgtgtgtacatttagttctatgcagtttttcacatgtgaaaatttgtgtgaccaccaccgcagttaagatacagaacagttccatcacaaggatcccaaatggtatgcctttataaccatagccaactctctccttctttataattttgtcattttaagtagtctctataaatggaactatacaacatgtaaccttttgagattggctttttaacatcctagctgcttttaatccactgttgccaatttctatagcaatcctatatggattcttttttctttttcttcttttttttgagacagagtttctgtcttgtcacccagactggagtgcagtggcgcgatcttggctcactgcgacctccgtctcccgggttcaaatgattctcctgcctcagcttcctgagtagctggtgttacaagtgcccgccaccacgcccggctaattttttgtatttttagtagagatggggtttcgccatgttggccaggcttgtcttgaactcctgagctcaggtgatccatccgcctcggcctcccaaagtgctggggtgaattcctttaagtagatgaggaagtgaaaccccggaagagtacagtgtcatgcccaaagctatattattagtggaccaggaagcgaggaggggcccaagcatccctgattctcagccttgactcctttcactcagcgttggcctttctctatctggattcccagtgttcatattctgtttctaccaacacagttctccttttctcttcctctgtactcaaaataaagtctctcttgttttttataaatcttaaattttaaaaaagaagcttggatcacattattattttggaagtgcagagattggatattttttccgtccagctctattttggtcttgttaccattttcagtgttttctgtgctgagttgcttcaccaccttgatgctgccacaaatgatgaggatggttgtagtatagagaataaaggtggagattcttgcacatcatttcttgaatccatgtataggcatctttggcttgcagcccatctgagtgctgtattcagcctactagctctggttgctctggtgctaaacatattcccagcgcctttgggacttaactcactacaggcaagaagctgtcagtgcactgagggatggtgggaaagcaaaatgcatacatttctatttatcgcagtagtgccagatgctgtatatttaagaaaaaaacttccagtattggagaagaattgccgtccgcccccctcactttatttatttatttttttaaacagggtctgggtctgtcacccagactggagtgttttgttgcaatctcagcccactgcaaccttcacttcccgggctcaagtgattctcctgcctcaacctcctgagtagctgggactataggcatgtgccactgtacctggctcattttcttttttagtagagatggggttttgccatgttgcctaggatggcctcgaactcttgagttcaagcgatccgcctgttttggcattccaaaatgctaggattacaggtgtacaagtgtgagccaccatgcctgaccataagccttttgaaagctgtacttttgaaatgtatgtgggatgtagtatttaagaagattaggaaacagcaaaatgtgtagatttttgttgatcattgaaccgcctagacattctcttctttcagtgtccatttacgtatgtatgtattatgtatttagagacagtgtcttgctctgttgctcaggctggagtacagtggcactatcacagctccctggaacctcgaactgggttcacaacctcccatttcagcctcccaaatagctaggattacaagtgtgtactaccatgcctggctaattaaaaaaaaaaaaaattgtagagatgtgctctcactgtgttgcccaggctgatcttaaactcctagcctcaagcagtccttccatcttggcctctcaaagtgctgggattacaggcatgagccaccatacatggcctttcagtgtctttgaactagctattccctctgcctggaaaactttcctaagatttccatgcagtttggggcacttcctcaccttcttcaaatctctgtacaatgttaccttttttctgtgtctgtgcctgacatttaaaattgtaacacctcaccctcaccccattctgctttacttttctccatcacactttgatcagctttgaacatgcccctatgtcttcgttatgtatctatgcattgttttctctttcctagaatgtaaacctcctgaaggcagggatttttgcctattttgctcactgctgtatatccaaccttttagaatagtgcctggcacatactagatctcattatacattatacaagtaaatgaaagttttcaagattaaagatttgtatgaattaagttaagtaacagcaccctcttacaggacacaagagaataatcatgtctgtacaggttggcccctggtaagatgctcatttaaaaatggttgtgtcagtttaatataagtgtgttcttttcttgcctacttaaaatgtatttctaactatgacttttcttttggaaaatgattgactttgggggagctctttcagaggtaaaggaagttaactagcagatctaggtaactgaaccttgtgtactattctagaaatgtttatacttctgccaaattgaagcatgagttcagtgtttgcataaccacctgtgcagttactcatagtagcattccagtatgcatttgctgaactatactcttcaattttgcaataaaagtattttcacatgttggctgctactgtgaaaattggtttctctcaaatgttcggaaagcttgtgctgcagttttgatgtggggggtgtggtttagtgctgcataacatttacttttttggtggaagggggatctgtgatgtaaacttttggtttcaatttctctatttggagctctttttgttagtgctaagaattctgagggtatccctatagatgctggttaaaaaacaaacaaagcaatgttgtcattgacagtttggtcaagtgggatgtaagctgctgagtggggtgaagacctggtctccttggggctgatttggggtttgggagtggtttggagggtggctgccattgaggagcaggaagtgtgggggttgctgctgtgtctggaaggacctcctaggggagagctagcaaaccaacatcaccagtgcccccagaacactcagctgtgtgtgatgtggctgtgtgtgcccttgctggtactcagtcctgttaaggcttgaagaggaaggtaaggagggtaagacttggagagggaagagttaaggagggagaatattaatgcagtaaggaagtaattcatattttgagacaggttcccatgtgtgaacacttgacttccaaacagcccacacttggcttcattatctacagaccacctctcctgtgctgcattcagactctcccccaaaccccgacggagcctcggtctgtcgcctaggctggagtgcagtggcatgatctcggctcactgcagcttctgcctcccaggttcaaatgattttcctgcctcagtctcccgaatagctgggatttacaggcacatgccaccatacccggctgatttttgcatttttagtagaaatgaggtttccccatgttggccaggctggtcacaaactcctgacctcaagtgatctgcctgccttgacctcccaaagtgttgggattacaggcgtgagccaccgcacccggctgcattcagacctttccacgtcagctgaactatcagtaaaattctgagcacaactctgagagaaattcagagttcaaatcagttggtatgccagaagcagagaaccctgatccttactggagttgactaggacaccttctctttattagttaaaggtatggctaaatttaaataactaatagaggtcagacacgacttacttagtttctgagagtagttgttaactgtccttttcccaagggaaataagctaagctgaattacttaaaccacactttttccgtttcttaaaatgatttccatttccctgccctaggaaaagtaggcggctgcagagaggttgtgacagaattataaagctatttgagttaaattagcccagtacatcactcttagagcacattgaacagacagctaacacctcctgataagcaccagctacatacagatcaatgttttcaaatgaaaccaaagacatacattcaatttagggagacaaaacagacattactcaggaatctcatagaaccccagatgattatgatataaccaataacataagacccacctgattggcagttctgtgaatcaccctaaaatctctactaaaatggttaagtcctgtactctttactctggagtcctcttgtctacctttcagaaatggttgaaatatttagatgtggaattaatgagattttacatgtctacactcttgctttatatattttaatgtgataaatggcctcatgtatgtatattcttccttgtcccagactcatgttttttgagtaaaatctttaattggtcaaaatgtgttgtattgatcagtatgttatatagaatgatgtacttattgatttactgtaaataattacagtggagcaattctgttaggagggttcgtttttgccattttagcaaggaaaatttgccagttattttggctgaatttaaaaccccttacatgattagatcacatgtctatttctgctgtaatagaggagtgtaagtaactaagtttatctgaacttttaggagtctccttttaggctcaaattagttagtctggtgtctatacagggcctttgttaaagactggatttaaatattgggtggatctgtcttggatcctgttctagggaacgcttcttggaagtcccagacggggaactcatcataacctggttttaccccgtagcatggccctgtgccatcgacaccattagagcaaggctcagtgtctcgagctttagtttaattctcaacccattgatcgctcttgcagtcagcttaacagttgaatgcaatgctgtattttgttttttttttttttttttaaagctagtccagaaattaccacagctgcttctcagttaatcagatgcttaagactcccgtttccacattgcttggctgctacatttttataacaccacagctgtctggatctagcttgtgcccctcgccccccttacccctttccatctgccacctctcaccacttcctcacttgctatgtatcgaggtggcaaattcccaagtaaactgctgactttcctcccctgcaggaaggctgggcctttggttcacagtagcctctttcaccagaactctcgtaggctaggaaccaaccctggagtactgctgctctcagaagtgcccacatttgcctctggagcttgctttgtgtgtttgggtgttgaattttccccttgacttggaaacttttgtgaagaaactgaaaggtgctttcagattaagcagctgtggctcccccttccagccacgctctttgtttttaaagctcaaagtcttatttgaagtgaggagagaaggtaggtaggttgcagtccaggtttttctgtttgtgaatgacgttgcttaccttggctgattccttttcctaatgacggtgcttctactcttggccttttgccatgtgtgtaccatccactgggagctgttttcccttgtcctttaaagcgtatccgactctatctccagtgctcttctagcaagctgttacagtaagcataaaaacaagcgcattaaactaggaataaaatgccaagtttctgtctccttgccaacctcattagaaaacagtgataaagtatgtatgcatataattacagtaattaaacatttgaaaccagctcaatagggaaccttcttaatgcttttatgagtgtgatattttcatttcagaactggactctgtgtggcttctattttattcaagaccttcatctttatgggggtaggcgggggaaggtgctccttttgaccacagcgccaagcatctgcaagagtagctttattacacatgtattagcagggaacagagcaacctttccatcactgtgtttatttttgagggtgtgtagccagttgtcaaatataaagacatgaatggcctggctagtaaagaagacgtggaaaataattgtaaactgtctgccatgatgtgcttgctcttaagagcaaaggacaggaatattttgtcttttgtactgccccgacggagtcatacagcccctgcatttgtgtgggatgatagagtagcactatggggtttgtctgcctcgtagctcttccaccctgagagctattctcacttaggaagtggaaagtctaaaggaccaactgtaggttgaaccaggagtttcattcactaaacatattttttttttagttgatatatatatatgtaaaatttcaatagcttttgaggtacaaatggtttttggttacacggacaaattgtatagtggtgaagtctgcgattttagtgcacccatcatctgtgtatattgtacccaatatgtagcttttttttatccctcatctctctcctcccctcccctcttctgagtcaccaaagttcgctaaatgactctgtatgcttttgtgtacccatagtttagctcccacttataagtgagaacatacggtatttggttttccattcctgagttacttcacgtagaataatggcctccagctccatccaaattgctgtgaaagatatttcattctgttttatgtctgagtagtattccatagtgtatatagaccacattttctttatccattcatcagttgatgggcacttaggttggttctgtatctttgcaattgtgaatggtgctgtgatgtgtgcacgtgtctttttgatagaattacctcttttccttttagtagttgcccagtagtgagattgctggatggaatggtatctttactttcagttctttaaggaatcttcatgctgttttccatagaggttgtactaatttacattcccaccagcagtgtataagtaagtgttctctttttaccacatccatgccaacatctattgtattttacctttttagtaatggccattctggctggggtaaggtggtatcttgttgtggttttaatttgcatttccctgatgatcagtgatgttgaacattgttttgtatatttgttggccatttgtatatcttcttttgagaaatgtctattcatgtcatttgcccactttttgatgggattatttggtttgttttcttgctaatttatttgagttacttgtagattgtgggtattagttctttgtaggatgcatagtttgcaaatattttctcctactctgtgggtcatctgtttactctgatggtgatttgctgtgcagaagctttttagtttaattaggttctatttatttatttttgtttttcttgcatttgcttttggggtcttagtcataaattctttacctagaccaatgtccagaagtttttcctaggttgtctactgtaattggtttcagctcttagatgtaagtctttgatccatcttgagttgatttttgtatatggtgagagatagggatccagtttcattcttatacatgtggctatccagttttttcagcaccatttgttgaatatggtgtcctttctccaatttatgtttttgtatactttgtcaaagatcaattgtggttgtaagtatttggttttattactgtgttctctgttctgttacattggtctatgtatctacttttatacctataccgtgctgttttggtaactataaccttgtagtataatttgaagttaggtaatgtgatgccttcatgtttgttctttttgcttaggattgttttggctattcaggttctttttggttccatatgaatttttttttctaattctgtgaaaaatgatgttagtattttgatagaagttgcattgaatctctagattgctttgggtagtatggccattttcatgaaattgattcttccaattcatgaggatgggatattttttccatttgtttgtattatctttgatttccttcagcagtgttttgtcgttcttgaagagatttttcacctccttgttaagtatatttctaggtaatttattttatttttgctgttattataaaagggattgagttcttgatttgattctgaatttgattgttgttggtgtatggcagtactactgatttgtgtacattgattttgtaacctgagacttcactgagttcatttatcaaatctaggagtcttttggaggagtctttagggttttctaggtatataatcataccactggcaaacagagatagtgtaatttactcttttccaatttggataccctttatttttctctcttgcctgattgctctgactagggctcctggtgctatgttgaatagaagtagtgaaagtgggcatccttgtcttgttccagttctgaagggcaatggtttcaacttttccccttcagtatgatgttggctgtgagtctgtcatacatggcttttattattttgaactatattccttctatccctagtttgttgagaatttttatcataaagggatgctggattttatcgaatgctttttctgcatctattaagatgatcaatagatttttgtgtttttaaaaaattctgtttatatgatgtttcacatttattgacttgcatttgttaaatcatccctacatcctggatgaaacccacttgatcatggtgaattatctttttgatgtgctgttggattcagtttgctagtattttgttgaggatttttacatctttgttgattcaagggtattgttctgtagttttctttgtcttttttttttctgttatatcctttcctggttttggtatcagggtgatattggtgtcatagaataagttatagaggatgccctctttctcaaccttttggaatagtttcagcagattggtaccaatttttctttgaatgtctggtacaattcagctgtgaatctatctggccttcggctttttttttttttttttggtctgttcaggatttctatttcttcctgattcaagctaggaagattgtatgtttccaggaatttgtccatttcctgtagattttctagtttgtttgcatggaggtgttcatagcagtcttgaatgatcttttgtatttcttttggttataatgtctcaattttcatctctctctctctcttttttttttttttgacagagtctcgctttatcaccaggctgaagtgcagtggtgcgatcatggctcactgcaacctccacctccctggttcaagcgattctcctgcctcagccttccgagtagctgggattacaggcatgcgccactatgcctggctaatttttttgtatttttagtagacgtggggtttcaccatgttggccagaatggtctcgatctcctgacctcgtgatccgtctgcctcagcctcccaaatgctgggattacaggcctgagccactgtgcccggcctccattttcatttctaattgagcttacttgaatcttttcctggttaatctagctaatcatctatcgattttgtttatcttttcaaaaaaccaagctttcgtttccttgatgtattttttgtttgtttgtttcagtttcatttagttctgctctaatgaaaaggtctttgttatttctttcattctgctagctttgggtttggtttgttcttgtttctctagctccttgaggtatgatgttagattgtaagtttgtgatctttcatactttttgatgtaggcatttagtgctataaacttaactcatagcactgctcttgctgtatcccagaggttttgatgatgtgtatcactattattcattttgaaatatttcttaatatccatcttgatttcattgttcacctaaaagtcatacaggagtaggttaatttctatgtatttgtatagttttgggaattccttttggagatgatttctagttttattccactgtggtctgagaagatacttggtatgattttgattttttaaaatttatcaaggcttgttttgtggcctatcatatgatgtgtcttggagaatggtccatgttctgatgagaagaacgtatattttgcagttcttgggtgggatattctgtgactatattaggtccatttgttctagagtatagtttaaggttgatgtttcttagttgactttcttccttgatgatctgtgtggtgctgttagaggagtattgaagtctgcactattattgtgttgctatttcttttcttaggtcgtgtagtaattgttttatgaatctggagttcaagacttaggtgcatgtatatctaggattgtaatatcatcttgttcgattgatccttttattattatataatggcattttttgtctttttttactgttgttgttttaaagtctgttttatctgatgtaggcatagcttttcctgctcacttttggttctcatttacatggaatatctttttccaccactttacctggagtctataagaatcctttcatgttaggtgattctcttgaagacagcagatattcgatttgtaactttttatccattctgccaaagtatatcttttaaatggagtatttaatctcaagatgcaaggtactgttcagttatgttgattgttacataggtacttagttttcttcattgtattattgttgataagtcctataagttttatgctttctagaggttctattctggtgcatatcaaccttttgattcaagattaataactccttttagtatttcttgtagggttggtctggtagtgacacattccctcagcatttgcttctctgaaaaagactccttcatttgtaacacttagtcttgctggataaaaaatgattggctgacagttattctgtttgaagaggctaaagataggactccaatcccttctggcttgtaaggtttctgcggagaagtctgctgttagtctggtatgttttcccctgtaggttacctgatacttttgtctcactactcttagaattctttccttcatgtttactttagatagcctgatgactgtatgccttgatggtgtcctttttgcagtgaatctcccaggaattatttatgcttcttgcatttggttacctaaatctccagcaaggccagggaaatttttctcacctattttctcaaataagtttcccaaattttttgctttctcttctccttcagtaacaccattgattctaaggcttgactgttttacataatctcatatttcttggagactttgttcatttcttttaattcttctttatttttgtctgggttaatttgaaaggcttatcttcaagctctgaaattcttttttctacttgttctagtctagcgttaaaactttctactatattttgcaatttcctaagtgtatctttaatttccagaagttcggattggtttttcttcagaatatctgtctctttagaaaattttttgttcatactgtgaattgttttttcaatttctttatgctgatttttacctctgtcttgtatttccttgaacagctttaatagtccaccttttgaattctttatctggtatttcaaagatttcatcttggtttggatccattgcagaagagctagtgtgatcttttggggttgttatagaaccccgttttgtcatattgccagaattattattattattttttgagatggagttttgttcttgtcacccaggctggagtgcaatggcacgatcttggctcactgcaacctctgcctcctgggttcaagggattctgctgcctcagccttgcgagtagctgggcttacggtgcccaccaccatgcccagctaatttttgtatttttaatagagatggggtttcaccatgttggccaggctgatctcgaacttcctacctcaggtgatctgtctgcctcagcctcccaaagtgctgggattataggcatgagccaccgtatctggctgccagaattatttttctagttccctctaatttgggtaggctattctaattattcttgaatttatttttgatttgacttaaaaattttttttctcccttgaggatgtgactttatcgtttattgtaggctaattcagctcttggtgctttcagggatgaagactgtgtatgacttccttggttatagagagtctttgtatgacagctttcttagatgctggttgtagtagcatagtgcttggtttgtgagcaggttcattgtctcctgtgggattggaattgcgaggtctcttaaagcttatctcattgcactttttaattaattaatttttttctgcagtattttatttactgagttgaacagcttaggcttcaggccagtaggagagatgtccatgggtaaaaatcagttgtggctaaagcaggttggtaaatgcaatactcagtggtgggcagaggtcccagccttgatagaagcagctggggcagctctcagtgaaatgcactgaggtcttttcaagggaaagggaagaagccacctcagcttccctgctaggccagcaggaaagtgatccaccttccaattacactcctgacccagagttccagctattctgatcaggcacctcttttcatctgcaggaatgttgatgttcaacatagaaagggattgtgactgtacccctcatccaagcttgaacctaggggacatgcattctctgtggatgcagttaccctgaagtattccagaaaggctgtctacaggtgcatccatgctgagctcccatgggggaagcctcagctatgtcgatagtggatgaagaggagaagaaatcaccttctccaagacccttcatgggcaccagggctgactggctgttggggtagagccacagacgttttctgctgagccaagcattgcaactgtgcctctgctaaaagaaacttcccagaaatgggaagttctgggacttaaggcctgccatcttgtgttttttgtttcatggagtgctcccttgatgtcatgtacttcttcttcccttaggagtagaaatccctgaagtccagactactgtgaatgcaactcttatctgggtctagctgcctagtggggctgccacactccagggtggtgctgggggatgtctccaaggaatccagtgatgtgacctgtcctcaagtatcccagcagtgggtaccagcaccagttctgatggggatggcaggggagtgctgtgagattccttggtcatgaaaagccttagtgtgttggttttctcaagtactggttgtagtagtagatgaactggtcacatggacagactcaggatctcttggttagccagggtgttgcaggcaatagtgattgctgaggtcacacatgacttttctccttcctgcatgttgtcttcttctgcctgaagatgctaatctcctatgtcagttggcctccaaccagaaggtggtgcttgcaaaagagtaccagctgtggtggtggtaggatttatgctttgccttatgtacccaggggaagtactctggtgtctcaggcaattggtggggctatagagctccgaaaagtttctgttctttttattaagctaccagggtaggattgaggggcaaagccaggtgagggctgggtcaggcaagtctgtgctctagctctccatatgtgggcaaaagtagaggtcccagtggggatcagaaggcagttttctgactgctggggtatattgaaggaaaaagcacagctgcttctgctgcaccaaagagtctgcatggagaatggggagtagcaggtagcagcaagccctacgcagctttcatgcacttggcaaggcaaatctcatagccacagtgtaccactagcagcagctagctgggtttcagacagttgacactcagaactcaaaactgccccaggccattagcctttgcatggccttcaggccacatttctcttggtctccctacacagcaggggcacccctgtgctctcttatggctgcagcacacttcccacttgcccctcagttctggccaagggagcttgttcccactcatatcgtgaatctcagttgagcttctctcaacctgtgattgctgtctgagttagctggctgacttccacaaggtcccctgtgaggtaggatcagcagtggcttccctctgtccttgctggagactgggagtgcactgaaagcatgtccagtgctactccttctcatatactccccacggctcactgaatcagctttagtgctgggtagggttgagggcttcccttgtggcctggattgccaggttccccagtaggagtgcatatcctagaggtagtttatcctcctctcacactctagggacttagagttttccatctgcctcgtagtaagtttctgggttttttcctgaaaaaaaaattcacagtgtgaatctctccacactattttgtctttccaagtggtagaggcatgctcacagtgcctccaatccactctcttggggattaaaaaaaaaaaaacaggtgttattgggtacctttggggtgagagttagtgtacaatttagggacactattcttggaaccagacagaccttggtcagactcctggctcagtcattttctggttgtatggaccacagcaaatttaaaactttaaatctcggttttctcatctgtaaaactaaaataatggtggtcacacatacccataagattattttgagacttaaataagataatgcatacaaagcatttagcacaaagtttgactcagtaggtgctatttggtgttcatgccattattagctttgtattaaagaggtatatattgtcctatcttctaggagcttacagtccagtagggccataagatacatattgaggaaagaaagggggatgtcagcctgctgtgatgtgttgggagagactttcttgaggagttgggattggggccactgtgttgtacaatgccagggaacaccatttacatcatctttgagaatgggtccctctggagtagtacagttgcactgcttggaattttgaatgtgaccatgaaggatgtgtagaatttggatagatggaagaaggaggggtttgggtttggtaggaaaaaacaagattctttcagaggatggtgagacctctcagctggccagagagctttttgcattgagcagaggtagtcaggctgtgtgtcttgaggtggctccagggctttgcttctttctgatcactaaaaggtggatggaatgaaccttctggtgaaatgggtacaggtcagggtgaaatgcctttgatctcttcacattgccttccttgagtctcctcaggggccgggattgctatatttccaaaagggcacttttctgtgaatagccttttagcctggttaagtaaaccaaaaggctcacttgctttttctgccatttctttttctttaacattacttgtaactcattttgttaaataccacatttactcaatatgtgaagtgatcaagatgttgtatgtgtgaccctgtaccctggttctactttgtatagccttacatttcttttgaacttctttatgcactttttttctttccttttcttacctccatggaatttattctgctctttaaggactctcaaaggcatagtagatcatggcataaattaggtggcaagaaaggattttctttatcattaggcttctattcttctaaagctgtgtctttgggagattttaattgtgaggatgtaaataaagccatatggaccaaaagtgaatagcatatttaattatcttgtaaataactttagcttagtaaatctccgacgttattttaaaaacacagtattttattgggtatttagtattatatgatactctaaagcagaagtcaccaaacttttactctaaagggccagatagcaaatattttaggcttgcaggccgattctctgttgtagatactcagttctgccatggtagtgtgaaagcagccatagaaagtatacaaactgatggaggtggttattttgcattaaaactttatttaaagcaatagacagtgggtcagatttggctctctggagtggtttgctgacccttgccgtcaaggaaatagaaagagattttgttgggttgggaaggtaaatggaaaattacaggaattacaaaatttccagataatgaactctacaaaaaactaaaaaaaacttatacctcctattgtttgaattagatttcatgtttgatatgaatttgtaaataaatcccaaatatctttattgatagttcttcctttttaaaatctaaggacttggttcacaacaggcctgtctttattaatcaaccatttattgttttctttgcaccaggcactgtgtaggtcattggaaatttacaaataacttagacacgcatttttcctttaaggagccacagtctagactgtgtactcttttttgccagatgtggactcatgccttggaccacatgaaatatttgctctaaagtagcaagaaacctgcattggaaaagggactttttgagggtacacctatctttttttctctttctactatatgtgtgttaggactgctatattttcgtttctctttattgttgtattgttagagaaagtctgctagaatttataaatggtgagaatattttgataacttagttgccaaaattcctagtcttgattccagaggttgtgttttcctgccctttaaaattttcacttagtcaccttaattcagtttttgaatttctttgagttctgcctatcaaattataaacaagcaccaccaaattgcagaaggttatctcttaatagtattgaaataggcagttataaaaaattgtgtcacctaagtctaacagctcttctagaatgttttcctttagacctaagccattctggcccttgcacattgggtgggtctgtgatctgtttctactcacaacacttctgacacaaatggctggattttttccacaccaacaaccaattcttcgactctgacactacccagagttagcacagaccccacagattatgggcttagacccacaagactcttctccactttagatgccagttgtaagtccaggtctcctatacttctgaccaagagatgataaatcttgagtttctatgagccccactctttgggttcagtaattctctataaaggctcacagaactcacgaagtcactttacttcctattactggtttgttatagaagttacaacccaggaacagccaaatggaagacatgcacaggacaaggtatagaggaagggcattgccctctctagatgcccaccctcctagcacctttgtgtgttcaccaatccagaagctctttgaactctttaacttagaggttttatggcgtttccattacatagtcatggttgactacatcactggtcattggtgattagttcaatctccatcccttcttccctccccagaaatggggcaggggctgaaagttcattcctcaaatttcgtggttggttcccctggcaaccaccagccctcatcctgaagctctctaggggcccaccaagagtcatcacatttgcctaaactcaagtatgattgaaaatgggctataataatgaacaagagacactcttctcattcctattgcccaggagattccaaaggttttagaaactctgtgctaggaactgggaatgaagaacttatttttatttttttaagacagagtctcactctgtcacccaggctggagtgcagtggctcaatctcagctcattgcaacctccgcctttctggttaaagcgattctcatgcctcagtctcctgagtagctgggattacaggtgtacgtcaccacgtctggctaatttttgtatttttagtagagatggggtttcatcatgttggccaggctggtcttaaactcctgactccagttgtgtccggagttggttccttccagtgggttcttggtctcactgacttcaagaatgaagccgcggacctttgcggtgagtgttacagctcttaaaggtggcacggagccaaagagtgagcagcagcaagatttattgtgaagagcgaaagaacaaagcttccacagtgtggaaggggacccgagtgggttgctgctgttggctgggggtggccagcttttattcccttatttgtccccgcctatgtcctgctgattggtacattttacagagtgctgattggtgcatttacaatcctttagacacagagtgctgattggtgcgtttttacagagtgctgattggtgcatttacaatcctttggcaagacacagggcgctcattggtgcatttttacagagtgctgattgatgcatttacaatcctttagctagacacagggcgctgattggtgcgtttacaattctctacctagacagaaaagttctccaagtccccactcgacccaggaagttcagctggcttcacctctcacaagtgatctgcctgcctgggcctcccaaagtgctgggattacaggcatgagccacaatgcctggccttatatttcttattatatcataaaatcacagtggagttggatgggggtgagggagggcagtctgtgaaagagagaggttctgaagtccaaatgagggcagaatgtggacttctctggccctgaggagtgggttgggttgagtactatggggtgatttgattggacaggttctgatgagtctggtagtgggtacctcaggagccatgaggacatttaaatgtcacagtgtcacagaaaacatagaagattgttccctaacttgggtagtggcatgagaaagtgggtctgttgttgggaataaggtaggctcggatggtggtttttgagggtgccaagaaatgtctttataaggtttcaaatgtacatagatgtagaaggaagaatggtgccattctaaagtttttttgaagtgaaaaacaaaaataatatattttaaagatacaaataatttccataaacatataacaatccatagagaagagggtaatgtccttctggtgacattaattgaaatactttatgccagattggacaaaatctatgtttaaattactggtattagtattttggtattttccctttagtaagataatcttgataaccttgatttgctttttgtgtcctgattaccttgacattaatatcttgaaatagaaaaactgtggttcttgctttggtagtacatatactaaaactagaacaataaagacattaacatggcccctgtcgaaggatgacatgcaaatttgtgaaatgtttcatattttttaaaacaaaattatggcttgtatatttttaaaactttgtattatgcaaaacttcttgagaacaaataattatgggaacttttaaatacatgcaaaaatagaataggataataaacttcccatctacattttatttatttatttatttaatttttgaggtggagtctcgctctgtcgcccaggctagagtgcagtggtgtgatcttggctcactgcaacctccacctcctgggttcaagcaattctccctgcctcagcctcctgagtagctgggattacaggcatttgccaccatccccgggtaatttttgtatttttagtagacatggggtttcacatgtttgccaggcaggtctcgaactcctgacctcaagcgctccgcccaccttggcctcctaaagtgctgggattacaggcgtgagccaccgcgcccggctggtttttaagacatgaaatttcagaatgtttgttttcaagaaagaaagcccaattgcctcaatgctttatttgaggacagagcctgaggcacaggagaatagcacggtgggacattactggcaccattgccaacacagctcacacgcagcaacagcacgttttgttggttttgccagcgttgatgctcagatccctctgtggccaccaatagccagcacctgtgtcaaaggtggctgcctcaattaagacacaaaccaaaaattctaattatatagtagtttctgtagtatcagccacgtgtacaataggtactcaggtgtcatttgctttttcttctaccacaagagtggccttggactcgtgtgtccgttgggtgatggttgaggttgctctgagccagtcccctcccctggtccactcagtggaagctgtgtatgcccacatggcactgtatggacaccagtttgtgtttttttaacaaacattgctatttttagatttgctttcagaatgcgacctatggggcagaggacccagaaatatatagcttctacctcattgcctcgttctcagggatatccaagcctcactgccttgagaaattaagagacagttccagcaggtactgtcttacttgatgactataaattctataatcattgctaataatagagtgttttgttcaagccgcttaaatttgtttattttttcctctcggcaagcctaacatcatcatcctcaaaagcatggttgcctgtgaatttccttttggatagatgtaacactatttaatttcgcccatccattcatctatccaagcatccagcaaacatttatcgagtacctattatgtgctgagtactcttttagatgctggagggacaatgattaataagataatctttctttacagagttcacattcggtgagagaggaaagttggacattaaaacagatagtaatgtggtgagctaagtgcagctataaagttatgtacaacttatcaggagaaccgttatctaaggcatccagttcacagaagggaggagggaacaccatgtaggcaaggggaatttcactattattgccatatatccaaggccaagagtggtgagagaatgggctggagatgtaacaaaggtgctctgtgacagagtttgaacttcagtttgctggtgaggtgtggggaagtctatgaacgggattcgaacagttgagtggcatgattatatttgtgttctagaagaatccctctggtggctctgtgcaatgtggttttcagggagtgaggactggagacagagtagataagtgagaatgctgaggggcctaatgattcgttcatgcatttcatttagtaaacatttattgagcacttactatggaccatgccctgttatagtcatttggaatttattttcacatagataaacagaagagataaatagtagtagcttttttgggataaatagataccaaataaatcacagtgttcgctttgatcatgacaaacttttgaatacatgttttctagagttatatattgatttggtggtatttttattttggatttggatcagtcagcactaacataaaaaatggcctctttcatggtgcaaattagtaaggcttcactttcagctcttgaatttttccaagactcattattccagtctgtagattattctgagccttagactctcattttctgctcattagcacctcaaagaatggagaggaaggaagagagagaaacttcagtctgacttgctacttgttagaagatttggtaaagaaggtgatgaaattaatatttagttttcaaaatcaggttacagattgtttttgggcttgttcttgcctgcagttcttgctttctctcaaccatagctaacttgctgtctggatacatccgagtgtatttgcctcatgcacaatgaagggtaggattaaccttggaaatttgctgtgggcaaatagcccaagaattaatacatttaataatacatttaattattttaccaatcacactggttatttgcagtgtcaaagcagttaccttggtatgatataaggacatggaattaattttgttgtttataatctttgtgtgtgtgtggggtgggtggtgaggacggaatcttgctctgtcgcccaggctggagtgcagaggctcaatcttggctcactgcaacctccacctcacagattcaagtgatcctcctgcctcagccttccaggtagctgggattacaggtgtctgccaccacacctggctaactttttgtgtttttagtagagatggggtttcaccatgttggtgaaactgctgacctcaagtgatccacctacctcagcctcccaaagtgctgggattacaggcctgagccaccatgcctggcttgttgtttgtaatctgatatcttgctacttgaactttgttagtatggtttaggagtaggaactttaaaatgaaaacgaacaccgcccaggacgttgaagaaataactgtacccacttcatagggttgtcaggagggttaaatgagttaatataagcaaagactaaggtccagcacatagtaaatgtcatataaacactggtcatttttattgattttactttgaaagtcaattagaatttgcatgaaagtaacaagcaataggtgaaaatcatgatagtactagataatacaagacatcatgaggccggctgtggtggctcatgcctgtaatcctagcactttgggaggctgaggtgggcgtatcacctgaggtcaggagttcaagaccagcctggccaacaacatggtgaaaccccatctccacaaaaatacaaaaattagccaggcatgatggccggtgcctgtaatctcagctacttaggagcctgaggcgggagaatcgtttgaacctgcgaggccgagatcgcaccattgcactccagcctgggtgacagagtgagactctgtctccaaaaaaaaaaaaaaaaaaatcacaactgactagataacactctatgatgtcaccttttacttcactaagaacacatttaatgtacagactatatgcatttttaaatgctctggttcaaggaaagttaaaagtgtttatagttataggtctacatttgagaaatacttgttatgaactgaggaacaggcaaatccagcatttgggccacaacttttctttgatagttccccagataataggctgaagagcatatgcagagatataaaagtcaatgaataagtgaatagctgaatctgttgaacactatgctcacagtttctagttcaagacaaatgaaacattaacataagttgttctgaattttctaagtgaagaattctacccttctttaagttaaaagatttataaccttttcaatagcagtatatattctgcaattcagcagcttttctttctgtgattttgaagaccatcttttgaagatgcagaatttagaattcctacttgggggcatttcttcaattcagtgagccattcatgagattcaaccaatggaaacattaaacacaatgagtgtgaggaactgaaagtgctttgttttttggttgcagtgacttctaattgaagcaaaccagctatacatgtggatggtcatgactttataattacaattaaaatattttcagtagaagactgaggcctcagggaaagcatcgtatgaaatagagaataatcaccagatgcaactatgggccccttttccgagtgggtaatgatttctttgcctctagctgtgagttggcaaatggactctgtcattttgggtatctgttggaagaaagaaaaggaaggaacagaacgatgagagaaacagttcataagaaaaaaagagaaaaagatcttgagcagataggcaagtagaagtaaaaatcctcactgtttgaggcctccagaccttgttgaaccatgttactattgtagcattacacctgcaatgtgtctgcaggtgttctggatgttttgaaactcatttgatgtagaagcgtttcttgatgtcaagttatgttggatttggcatcattattctctctacaacagtagagtaaaggctggagagtattgaaaggctaattttttttggtgatgtctgccttagttaaaatagctactattaggtgatagaaatgaaggtatttagcacacacaacagttttattatgttttgtcttttagatgtggatttctctactttttttgttttgttttgtttgagatgaagtctcgctctgtcgcccaggctggagtgcagtggagcgatctcagctcactgcaacctccgcctcccgggttcaagcaattctgcctcagcctcctgagtagctgggattacaggcaggcgccaccatgcctggctaatttttctgtatttttagtagagacggggtttcaccatgttggccaggctggtctcaaactcctgaccttgtgatccacctgccttggcctcccaaagtgctgggattacaggcataagccaccgcacctggcctttttttattttattttattttaagagacagggtgttgctctgtcatctaggctggagtgcaatggcatgatcatagctcactgcagcctgcaactcctgggctcaaacaatcctttcaccccagcctctcaaagtgtagcagctgggactataggcacagaccaccacacccagcacatttttacaatttttttgtaacaaaaaagggaggcttctttttgttgcccaggctggtcttgaattcatggcctcaagcgatcttcctgtgtcggcctccaaaagtgctgagattacagacatgagccaccacacctggcctctacttaacaggcactaccaagaaagtaggaatgactgccctaaggggaattagcttttactccttactgatggggatttcctgcctccactactagagaaacccacatttccatgttttacgttcagtactcaccaaacatttccaagtgcctggcactgtgcttgtctcatccacagatgctctgccagtagaaaatggaatggttttaattgagaagacatgaggaggacttctatttcttaattggagtctataagcaaacttcaaaagaatctttcagcttctcattggtttaaaaattatgacactgtctattatatgttttgcataactttaaatcttcttttagtcatattgtattgttttcttttttgagatttgggggggtcttgctgtgttgcccaggctgcccttgaactcctggactcaagctatcctcctgcctcagcctcccaagaagctggggatacaggcatgtggcatagtcaaattgttttgcaaaagtgttagctgcttgagattttaggcagattggaaggtgtcgatcacttcttttctccaaagtgtaaaatggaataattgctggaattggatgtcagtttgtttttattctagacactatgaaacatgactaatgatgccaggaatacttgagtcagcatgtgaaaaggaaaaagcaatgagttgtttctgcccagtgatcagagccaattaagcagggtaaggcaagctaatgttggtgtgggccgcagcaatgaagattttgtctgtcttgttctgtatgtgtaggactcatgataattacaagagggcatgcaatatcagcagaatacagtttaggaatgaagaatcaggagacactgagtttcctgcctaggaaaattttctgtgtgagactagccactggtgttgaactatgtgctaggaagcattttactctattgttatacattatgaactaatcatctgtttaagatttttctggtggcaattgcctagtttaaaaaaacaaacagattttaaaacattgcaaaagtgaagtattgcaaaaataataatgctttcctagatgcaccatgaacttcttcctgaaattagttgtgattaggcagctcactgccctttcacatgtgctattttgagatctcattatttggtgctataatgattgattttgctaatatatgttagtaaatttgttgccaagtttctcttaagcctctggaatatggctattattgacattacctggtaattttttaaaaataattttttctagacatatataggtacacatatatatttacatatatatatatatatatatatatatatttttttttttttttttttgagacagggtctcagtctgtcacccaggttggagtacagcagcacagtcttggctcattgcaacctctgcctcttgggctcaagtgatcctcccacctcagcctcccaagtagctacaactacaggcacatgccaacaagcgagcctatttttatatttttttgtagagatggggatttgtcatgttgctcaggctggtctccaacttttgggctcaagcaatctgcctgcctcagcctcccaaagtggtgggattacaagcatgagccactgcatcccgcctagattttttatatatgttttaaaaacaacctaggcaactctttaaaaagtcacactttttggcttttaaaaaatttttattttttttgcgacagtctcgctctgtcagcccaggctggagtgcagaggtgtgatctcggctcattgtcacctctgcctcctgggttcaagtgattctcctgcctcagccttcccagtagctgggattacaggcgtgaacaccaccacctgtaatcagcctggctaatttttgtacttttagtagagatggggtttcaccatgttggccaggctggtcttgaactgctgacctcaagtgatccacctgccttggcctcccaaagtgctggaattacaggtgtgagccactgtgcccagccactttgtggcttttaatatttgtgtgttttcaagcttgtgaaaaaactttaaagttggttgcgtgatttgatttgaaagctaaaataaaccgaatggtttccttcataagagatagttaactaatttaaagatagctatttgtactctacaagaaatagtatttttcaataatgttcactaattattcacagatatttcactaataatccactaatgtcattataatagggtagctggctgggtgggggtcatttccataggacatttttctatacatgtcatctttccagggaacgttgataattacactgctatacttggatgttgatcccaacctggacagtcttaaggataaaagggcactgggctgtctatcctaggatatggtggtgataatgaatgggctagacaatagctgacaggagccctaaggaccttctgagatagagcctcagattttttatcttttccttctgtcacagttgtctagatggtatcgagatcttgcagaagatgatgggttgaggttggtctggaatttgactttcttcttcaggggccttgtcagcagtagttactgttcaatgtgatagccactagccacatgtggctgtttgaatttaataaattaatgacagtgagatataattaaaacaatatttaaattacagattccttagttgcactaaccatattgccagggctcaaaaaaactgcatatggctagtggtgaacatagcaatacaagttctgctggacactgacatctgtagaggcatggtggattgtccaaggtcacatggctagtcagtgcaaaccaagtgtttggactagtttagcagttattcttttatgtcacgcaggctttcagttttgggtattacaacttgaactaaaaaattgtccctggcatgccacattcttcttccaaactgtgagaaactcaatgacagagttagaaattagttattactacataattttagttttacaaatatctgcaattcatcttaggctgtttttttgtgtgtatgcatgtgtgtgtatatgcatgtgtgtgtgtgtgtgtgtgtgtgtgtgtgtgtgtgtgtgtgtgtatcacatgtggtatggtaagagtttgccacctgtgccatacatacattgctaacctggtatatatgatacacaaaccgtagatatatatgggatctagaattgcaggttattgcagttggacaggacttttgaaggtatctagcttaaccttgtatgtatgtataatactcctgacaaagtttttgatagtgagagacctgccttataaaagagttcacttctttccacaacttcaaattgatcttggaattttctttatatcaagcaaaaatgtttcttcctataatttctatacattgttcccagttggctcagaggaaaacatttattccctctgacatatgcagccttgccaatatttgaagtctgttttcctgtcattcttatgtcttttctcctataggataagcagacctacttccttcagcttttccttatgtgacatgtttgcaaactgctcagcaccctgcttgcttcttcctggactgactccaggggatggctcagatctgtgtaactgaacatttcgcctttcatgtgaatggatgtcatgctagatacatttggaaaatctgaataagtctttcttgaggcaaaaaatggctaccagtatccacgtgtaggaaatatattgatttagttttctttggtaagaggaaatgtagttgtctgtaataaatgtgttatttttataatcagaaactattatgccattttaataaaatttaattaaaagcaatacccctctttataattactggattgggtagagtttaggtctagtggatgggaaaaaaaaaacaacagtgttcctgatcttcctccctccttttttccctcccttcattccatccattgagtaatctttgtgtgcctgttatatgttactaactatggcactagggtcacagtgttgaagaagagagtggtttctttcatggtgagaggcatgaaatgagtgatttaattattctggcggtgggaaggatgcagtagaactctgttcagatctccacaataacttacgaattgcatgatcctcagtaggtctttcattctattcttgtttttgaatttctgaaatagcaatgatacttggagtagcttccttataggattgttgtaagacttataaataaaattataggtgagatttctataaagatcatggttaggccaggcgtggtggctcacacctgtaatcccagcactttgggaggtcgaggcaggcagatcacttgaggtcgggagttcaagacgagcctgaccaacatggagaaaccccatctctactaaaaatacaaaattagctgggcatggtgacacacacctgtaatcccagctacttgggaggctgaggcaggagaattgcttgaatctgggaggcagagtttgcagtgagccgagatcacgccattgtacttcagcctgggcaacaagaatgaaactccatctcaaaaaaaaaaaaaaaaaatcatggttaagtttttaggtagggcatggtggctcatgcctgtactcccagcattttgggaggctgaggcgggatgatcacttgaagccaggagtttgagaccatttttggcaacataacaagacctgctctacaatttttttttttttttaattagctgtagtcctagctacttgagaggctgaggcaggaggatcgcttgaacccaggagttggaggctgcagtgagctctgattgcaccacacactctagcctgggcaacagagtgaaaccccatctcttaaagaaaaaagaaaagaaagatcatgattgttgttgctattgttattgatgaataatacgttcttggggaggtagtgtggctgatcttccacgctaagttcccttttctttttcacctatttctgccttatgtgattcttttgccattttcttatgaaatttttctaacatacagataagttgaaagagtgttaagtgagcacccacataccaccacttagtttctaccatttacattttacttgctttatcacatatctctccatccctctgtcattagccagtgtttacaaacttgtatttacagagaaagatgcatgatagttattttccctgggaaatggagcccttcccgctatgattttgttcatcttcttggcagtgatagtgatggttatgatgacacagtagccagcacaaagcagcacactattaactcattcagtcttctaacaacgctagaagacaagtgctaaagtgctaaaattaatttctgttttacagaagaggaaactgagacacagagaggttaaatcatctacccaatattacacagttcctgaggggctaagtcagaaatctggtaaacacttgagtaagccttgtttgtttgcttgcttttaatctgtaaaatcagtgaaaaaagaagtaagacaccatttaggaataggaaaaataactactgcagctctttgtgattcaggttggtttaatgactactgtgtggcaattgtaccaagtgttgggtttgtgcaagtggttaagtcagggtctctcctctcaagccagtctaatggacagagccactatgagttgttggattgatgttttaatataaataaccgtactgaaattgttagaaatcaagggtttcagtaaaggagagttacctaattgtacttaaaagaaacatttatacattaacagttactattttggggtttctgtgagaagattaattattccagcaaatgagtactacctatttggaaatgtcttactgtttataagtaaatatgttacttatttccttttgccttagcagagaaaaataatttggggagaaatacacccaggaaaccttaaaatatattccgattaatggtaactcttagactatttatggtaaggtgtatctaattacatttcacaaggcactttaaaaaatattgtcccttcaagttttttccctttatttctctccatgattttgtctaaatttaccagcaagtcacaaaaaaatgaaaattaaaaccctactggggactaggagctcgctgaattggcttacatcattgtaagcatggacatatttctgtgcgttgctgtccccaagcccatgcgctgttaagaatatgcattgtcgggacggcggtgcaaggagaaacatcctggagaggacgtacaggatacagaaacaagtgactgctgtgacatcattagtcaacattggttgagtgacagagtaaataaggcatcttctgttataaatgattgacaccgctgaaaatttagaaacatcttgctccaatagcagcattatcttctttggactatgcaaatcttttcaaattaaaaattcaagttaaaagaaactatttttaattgaccctcattgcggccattccttgatcaatatctctgaataagattgttaactgaacaatgcatcttctggcagaaatagagataatgaccgttttgttttcacttatttttcttgttacaaaatttaaaagtaacatcaattttaaaagtctttttgttatacataagttacattttgggaccttctttaatgattgctcatatagtattgctcgctttttgaatcagtgatctgcctaagcatttgcaagtcactcttagcattcctcaaaagttgctgttataaatgataattttacatagaggatggaggaaatgagaaaattgcgtttgtcttcctattgaggtaagacataagcaagtggaaaggtggtttccagccggggaatgaagcctgttgttcatgctgttgtgtgttgacttgtccacttggatggctcctaggatcatgcgggtccttgtgacttccatatgtcacagatcttgcgtacagtttctgtgccttgccctcctcccagtcttttctgccctgtggttatttctctactgccactgaagggtggcactcaagcttttccttatatgagattcatccccttcagggtatgcggattccctgtgaaaaagctgagcaggtttattttgacagcactacctggagggcttgccccatttcttttcaggaaaatttaaaattattctgctttttttttttaagactgtctacttcattttataagccacaacattataaatacatctaaatttaatagtagaattataacattgctttcaaaatttctcactgggtcacagaattacagagctgaaagagaccttcaccagaagcaaaaccatcctgggaaaataaatatcatgttttaatttttttttttcctttttttttttttctgagatggagttttgctcttgtcacccaggctggagtgcagtggcatgatctcggctcactgcaacctctggcttctgggttcaagcgattctcctgtctcagcctcccgagtagctgggattacaggcacccaccaccacgcccagctaatttttgtatttttagtagagacggggtttcaccatgttggccaggctggtctcgaactgctgacctcaagtgatctgcccgcctcggcctcccaaagtgctgggattacaggcgtgggccaccatgcctggccgttttaatcttaaggtagtttcactaactcatggtaactttgtttatttttttgtattaacaacctttgctgtcagtagaaaagtacacttttctacttctaaaactgccacggaataataatggagtcacagcgtccttagagatgggcatttttcactccatgcagagatgcggaaatgggctcagagaggacaaggggctcacccaacattaaatggctatttaatggcagagtagggatgagaacctgtcttctgattgccggtccagtgtcttctgtaacacatggggccatttattttaagccatctagtccccagctgattaacaattttcatgtacaacctagctcatgagagcggcatcaaggaggaggttgtcattcagcaaacacttattgaggggggataccaagatgaagatcatgagacactgtcctgccctcagggggctaaaactccagaaaaggtttgcaggcatatttacagctaagtgctgcaaagaattaagcattcttaaggttctttctagctcagtcatttgaacttcttttcccccaaaaaaaccctttatttccccaactccacaaaagcaagtccttcttggttaagccctcatacaagcggaagtgctggtgtctgccaagggggccttgcaggctgttgggctaattgtggtccaaatcccctttcaagagggcatcttcaagcaggtggtcagaataaaattcttgatggttttggtaaatggcagcaagtagagcatgagggacaagcagtcaataggaatggggacatctggtgcatagggtggggcagatagggagtctgaaggggtagagggtaagcaatgaaagttgtggccgtagctgccaaacaaagggtgtttttacatgcacttttgccactggttatctaaggaatctgctatcacagtgcctgtgaagaggccattatttgacacatgagggttttcagtcaagtgaatagcatggtattcactgggctgcttagagaaatgctattatctggataaaggatggtggtgtctggattaactctagtatagtttcttccttgggacatcatctcttttccactaatggactcctaggtattccatcactcagcttaattttctcggggaatacatgaaacgtgaaatcttaattttagacacctaaattgggcaaataagctttttaacatatacatagatttaaaatacatttaggtttattttcattcaaatagcacatgctttctgtgtctgtgtgtgcatgtgcatgcagtgagggaagatactgacatcttttctggattatcatttaatattgatgttatttaatgcaaatttggaggatttaagaatattagaggggaaaagattacattttctaaagaattagaaaaggagccatatctctgaatgttgggttactgcaaaagaggaacaactgggtaaagaactatttaaaaattaatgaacaaggtaattttatatttttctggtatgggtggaattttttacttcctatagtaagacctagtgatgtcatgactaggacctcttccaccaagagctctcaactagggataattcatttgtttgtattcagaattcacaactatgataagcctttttgatgaccagtggcaaaggaacatcatcagtcatgaaaactcacaaatagagaaatcagcaagtatattaaagtaatggatatttctcttgtcccccaaaggtttcacatacaggtttgtcatgagtgtccttaattctagttaatctgtttcttgtgtaaagtgcttacggtgataaatcaatgtgggttttaattaccaactagcctgttagtgggtgggaagaagtttgttttccaaagcttggtgttagcaagtcctgtttatgtgataatcatatgcagacgacacaggctagctatgtgctggctatgggaatagaagatttagatcagacgactatctgctttataccagacactgtgctgtgtgaagtgtgacatgaacaagcccttccagaatcatgcaaattattgctccccatgcgaagacttttatgagtaaataatgtaaccaaggatatgagccccaagagctggtctggggtattgatgagaagcattagcaaggagaggctcacctcatggggtgctgcagggaatgtggcttttgaagctgataattgagggttcaaattctaactcttatcaatgttgttgggacaagttaaattgttataaacctctttgagtcttggtttccttgtctataacaagagaatcatggtaccttcctcatggagttaaacgtgataaggtaagtgccttgccacttctggtttacagcagttttcaaaaacaccccccttttcttccccgctcacagatggttcaaaaaaggaagagctattatgaactagtgtgtggagagaaggcctctggaaggatactttttgatacttatgtaagcgatccaggatgcacagccttttgtggctagaaaaaggccttaggcccctggttttgcaggtgtaatacagatggtaggggctgcacggctactatgacagtcgttccaagtgtttctgctcaggattctggacttgccattgtctggctctgccagaatgtggttgtctacctgcccaggtgaggatgcaacccttgcattagagaagaccctcaacagccatggtctctttgactggggaagctaataggagacccgaatgttctaagtgtatcgtggatggtttatgtttggtgactggatatgaggcagatttcagggaatggttgcaaattggtcaaatctggcaaaaatgtcagaggcattgaaaccacatatcaaactaagccttaaggcattcagaaaatataacaggctgacttctaagaagtgaaaaatataagttttgtttaacttatttaactaaaaaatgatgctaatgaatgtggaggggtgatttggatagaacctgttctgtgtggggccttcatgtaatccctagagaacgtgtaaatcaaattatgcctggaggaaattttatttccaatttcagttgctttactgatatgttaagggaattaaaaaatatttagctcggcctttcagagagctgttattactggttgaactatgactgttattttaattctcattagataactagtatcttttgagctgttgttagctaggctgtgtgctaaaaagttttatatacatcctcttatttaatcttcacgacacttataggaggtagatactacattatgtgtttttacagccaagggtgaggtgtaggggatctgataattcgctccaaatcacacagctagtaaatggtggagctggtccaggcgtgtctgtcttgagaagcgctgtaccattcaccttacaattatatctgtaggtattgtctgactcatagaatccatgcagtacatctgtgcagcttccatttctgtccttagcctcaattcctttctgtctttagttctctatctttaccttaaaatctccatgtaaatcatgctaacctagcacgatccatggtgcacccacttggcattttcagggaaaagggataaggcctataaagaaagtccacacccagcgcctggttctgcctgtgcccattctgactgctttatcttcagtgctttagatgaatgtgcatcttcctggatgcttttccttcctgcatgatttggaagaattagaatcagtcttccttccatgagtttcccagggaatcagagggactttttaagcataatgatggaatttttattgtcaccttttgttgtaaaatgctctatagatgagaaatagattatatccatccccccaccagctgtgcttcatggtaatggccaaaaaaatgttcagaattaagactgggaattttttgaattcatatcccaaagctcctttaaaaacttataacttggggaactaaaacaaagtcattttagaaggaaatgggtttttctctaataatggccatcagaatgattacccaagtgatgtcacacagctggcaaccttcttagggaaggtaactgatagcagaggaaagtctgcctttctctatgttagcacttcaaaaaccaattgttcctagaatcttcagtgtcatcatgaaacatatataaagcctctgcctattgtttgagtctcctctcactaagaggaaccatcaattcagacttgcccagactcattgagaagaccaggctaaccaagccatccttaagaaatttttctaaattccaagaagcaaaagaatatatttttattattaaatagctaacatacttactttagtttagatttatgatatagttctagttttagggttttcctgcatattgtatggtacttttatctccatatataatatatttagtatatttatgcttatttcacaggaactaataacatttatacagttttgaattattttaacggttcacatttgtttcacctttgcttttataacattgttatgtctcagctcttaattaataatgttgcagggatgcaattgctaattttaatattcccccccagaagaaacattttatacacaaacacacacacacaaaatgtatatgtatatatacatacacacacaaaatgtgtgtgtttatagatacacatataaaatgtgtatatgacattgtgtgtgtatatatattggagtaaaaagcaaggatagtcagctcctatgtttgcttatacaagacacaggaactcaagctcgcttgcttgtaaagtgaataaaattgtgttcttatgcaagtgtcacagttttcctgggactcagtttcctcattctcaaagaaggaatttaactgatgaattcaaggatcaactctaaactcattgaattgccttattaatctcttgggtcatgcaattcagtgatataactagggttagcctgagtgtttcaaagcaagattaatggaagctcattcgccagctgtcgggttaggagattattcacaaatgttgccctgtcatttgaatctggtagggtttgctgatgaataaatgaaccccattatactgacagccacctcactaatcgatcctaactaaaccaccttatcctcttcaccttccaattgtgtagccagcaacttgccagatctcagggacgttgttgggacatgtggaaggtctgagacagagggccggaaggacagacaatgccaccaactctattaatcagtccgcatttctcagacctggctctcagcctactgaatttgacaaccaaggatttgcgtgtagttttttttttttttcattttcaattaatttccctttttatgccttcctaatttctcttcttttctgactaagctatatatttacactgtgaaattgactgtcattaatctttttctgccttgatttcctcaactaaaaaatggttaaactaataccagccctttcattcatggtgatcttgggaggaaaaaaaaaagagataactgatgtcagagagtgctttgaacttaaagcaggaagattgttcaattataataagactcttctatctttatttttatgtgacatttagaatgttagcgttgaatacgcgtcaaggaagaaaatcccattttgaatgacagtgttagaatgacggcctgtaagatattggaattgcatgcaaaaaccaagaaaatgtgtttaaaaactgctaagaccaagccagctactgtttcttttcaaagaatatatgtagggaataggagaattaggtaactctagggcataataaaaaagaagaacatgtgctttctgattttgccaatctattttgtacttactttataattcaattttaagagtaaagtgtaatgtctgattcatgaatgttttactgtgtagtgattttttcttcttctagagctgtatggtccagtatgatagccactagccataattgctatattaatttaaattaaataaaaaatttagtcacactagtcacacttcgagtgcttagtagctacatcgtggctggtggctcctgtatctgaatgtgcagatacagaacatttccagaaagttctgtgagagaacactattctaggggaacagagaaaaggtgaaaggatattcccattctcccttttcccaaaattgtgttttagaatttaaatagaatctcaggttatatattataggtattatatttacaatatacatttgaaattattagagcatgaaggtggtggttgagcaggaaagcacaactccagaagatcattttttcccctactgaggacaaacataatttgataatcttcagaataacacttggaaaattctggaaccagctgtttcctctcaagttgcatttcttccataaagagttttttttttttttttttaaaaacaaaacaaaaaacttcatctaggtaacacagtacctagaccaatccaggagtcacttaaattgaattgctatgtaattatttcatgggtgtaaaccaaactgttaccttagcaaaataactagttttctcttatattccaatttcacttcctcagcaaaaccaatgggctccatcatcagtgtatatctggtctgaccacctctcagcactcctgctaacctctgtggcttaaccatcaccatctctcacaagctattgccgttggcccctgcctgagctccctgcttccactctccttctctcacccaacatggcagtcagagattggccttcagggcaattatcagtcagaacagtgtggacaacagccaataaagcctcacagacctcctggctcacctcacccccaccttatcacccctctgacctcccctgcgcttactcccttcaagccaaggctcttctttatttttcaattgctgcaggcatattcttgcctcagggcctttgcgtttgctattccctctgtctggaccatgcttatcccagatagccatatggttctttctcttactgcctttagatctttctcaacctcacttcataattacgtcacaccaagctatttaaaaatgccacccacctaacccaccactcctctccataacccccaggcattaagcacgctctattctctttttgtactacatttttctccatagcacttatcaccatagatatgccatatgttttacttatttattcctgtataatctcctttgaatgaaatataagctgcttgaaggcagagctttatgtctttttatccttggtgcctaccacaaggtaggcagtcagtaattattggttgaaagaattactcaaatatttaatgacagtgtttgtaaacaaagagtgctaatctaattgaaattcattttagcaagagatagagagtcaggaagacacatcctctggtgtaaccctgcctcccctccacttctaagattactctggttttaggctctgctttctgcctggctcaacaaggggcctccatttctctcctgcctgcacttgaggagccacatagaagggagtttgaaccagggcttcagggagttgtctgtggacagcttctgagagagggaagttggggcttcccatgttggctggtccctttgctggctggccagtcctttgtcaccatgccagcattctcaatggaggcaagaagggatcttatgggttttgcagcagggctgctttgggtatatgtttgtttgaacggggtagggacagtggatgaaggacccacctggagtttgctgccttgggaggggaggtgatgagctttaaacataatagaggctgggcgcggtggctcatgcctataatcccagcactttgggaggatgaggtgggcggatcacctgaggtcgggagtttgagaccagcctggccaacatggtaaaacccatctctactaaaaatacaaaaattagccaggcatggtggcacacacctgtagtcccagctactgaggaggctgattcacaagaatcgcttgaacccgggaggcagaggttgcagcgagccgagatcttaccactgcactccagcctgggtgacagagtgagacttcgtcttaaaaaaaaaaaaaaaaatagaggtgcagtgttccctgcttcacactaggaagtggttaatgccaaactggggcacccggcctgtttctggcaaagtgcaggggaaaggaaagcttggaaagggatctgtagcagtaaagacagaggagtcactttttgtttgttggttcccactgaggcacggcggaggaggcacagctgtgcagagatcctgggttgctaatttctacattaaaaggtgtagcagcagcagtgtttatgactaaacccgtcaacgtttcacttcctcctgttgtgaagactgggtttggcttaaaaagctctgcctgaactttcagtttatcttgaaactttgagacatttgtcaaagtgctgaatggagttattttagtaaatcagtgatgtttctgtgttccctgagtgaaacactagctgatctcatttacctgagcttcgagaaagaaaatattctctatttttaaaaatagctttgctcccttgagcatgccctttctatatgccctggctttagaagatgggctgccttatgtttgagattttttattcattgccactaaaataatatatggtgatttgtatacctcatataaggtctgcctcatcagtaccctgacccatcctttattgattatttagttttgtggatttaaccctgtagtcctgttggcacaatcaagggcaaaatcaagatccagaaagacatcagatacctgaaatcctttattaaagtggattttgcttaccctacatccattgttagaaatgacattcccagatcgtaagagctgcagaattctggaactgaaactctgtctttctgtaatgaatttgtgaatgaggaagttctttgaacacagtaggcaaaaggcaggggtgtcagcacttgacacttctatgcctttcctctactaggctatctttttattgttctatttcttttccttttggcaggtgagttgggaattagctagtagatctgttttaagtgggtaagctgcaaacaacagatttttaggtacttcccttataggatatggctattaaacaggaaggatgtgtcaattatgtggtaggcagcaggataaaacaggcaggacagaattattatcagattcacagaccgtagcaactttttgccttctaaaatcctgaattttcagaggtggaaatagggtgagaaggagcagtaaaacctgttgcattcattcactcaacagatatttgaacacctattttgtgccaggaatgtactgggcactgagaaatagagctttgaataggacagatgtggtccctgctcccaggcaccttgcagtctaatggggctggtagatattaaatatgtaatcccactgttaattaaaactgtgataagtattcataagaaaatgtgcaaatacggtgggagtatataatagggagacctggtgtagtctggactttcttagggaagtcctttacctgaagaatgagtaggcatgagccaggtgaaggtaaagcaagagggggaagggatagctcctaaagcagaggtggggcaggagccctcctcttgggagagcaacagaaggccagtgtggctgggttgaagtgaggctggaggtggaggcaggggccagtgtagtggtgcagagccactgaagagcttaagcagagaagggacataataatgtttgggttcttaaaagatcacgttcagatcctatatgagcaggtgatttgagggggcaggagtggatctgttagaaggctattgcaagtggtccaggagcaagagggtggtggcttggaatagtatcatagtagtagagatggagagaagtgaatggatgtaagaggtatttagggaggtagactgcattgaacttggagaatgactaagataggaagagaaggggacaatgcttggatttctggctttggaaaccatatggatgaccatccttgttcctgagccagacctattgtgggaagggcagattttgaaagaaagatcatggtttagttgttgacatgctgaatttaagggttggagtacatacaagtgaagttagatcaatagatctgatgatcggaggggagatctgggctgtgcataaagttgggagtcatctgggatggactgaagtcatgagagagaatgaatggtagcagggaatggggattggacatgtgactaggaataaccacagaggccagttgaaaatgtatggaaacgagaacatcaagcatgaagggccatgcccagtgctaaggagaaatctggttaggaagtgcatggatttagcagccgtgaggttggatttagcaatcaagattggcacctcaagcaggagaaatttaagtggagttgtggggacagaagccaattttgaacactagatgagtgaattggaggcaggaatatgaagacactgagtatgggtaccttttttgagaagttgggctcaaagggtagagacagttagaggggacctgcaagaggtgtgtaggatccaggcatatagctctaggtctaaacatctctatgtttggatatttagagatggaagagaaaggatatttagttgcttaaggttcctgcaaagacaggtgggatgtaacccagagcccacacgaagggacgggcatttatctccagcacttcagaaggagaggaagaggagggggtgggtacagctgcagatgcaggcaggtgtggaggtttggagtggaatggtaagtgataccattctgataatttctgttttctctgtgaagtaggagggaaagtcatcttcccagatgaagggaacggaatcaggttgctgggtaagatcagttctccagctgtgcttggcagctaccactgcaagcatggaataggcggctaggtaagttcagccaagattgaagttttactctgtgggagtaataaaaggacaaggaacacgaaggctaaggacattaacacatggaggaatgatttcagtggaggttcagttggatgaagataggttagtgctgatggagaatgacctggcagtgtcagggggcaataaacagggtagtggtagtacctgaataagggaactagctatgagtgcttctccaactgtaatgctaatgtgaatcacctggggattttagtaaaaacgcagattctgattcagcaggtctgggctgaggcctcagattctgcatttctaacaagttcctgtcacgccagcctctctggcccgtggatcacactgtgagggccaggtgtggtggtgcatgactataatccaaacactttgtgaggcccaggtgggaggatcacttgagctgaggagtttgagaccagcctgggcaacatagacgtcatctctacaaaaagtttaaaaattacctgggtgtggtggcttgtgcctgtagtagctacttgaaaagctgaggcaggaggatcacctgagcctgggaggtcaaggctgcagtgagccgagattgcaccactgcactccagcccgggtgacagtaaaagcctgtctcttaaaataaaaaaaaaaaaaaaaaaaaaagatttcgggcagagagtgggatgcctgaattagaaatcgtttgacatggtataatctcaagcagtaactaacatggcccaggatatgacagagtgaacaagaaggccgaagaattcaaaggcttcctgatcatcatatctttagggatgcaatgatttacactgactatcgccaacacttttctaagcaccttgtgtgtattaccttctttaatccttatgacaacctccagtgaggtatatattgtgatcccatattttacagatgaggaaagtaaggcacacagaggtctttctcaaaatcattcgtgcttgtaagtggtgggaccagaattcaaactggggtggtacagtttcaaagcctagtgctctgcatgattggatgctgtattgtcccctgatgagagaagttggggctgtatagaaagtgtgaggtgggaggatcatttgatcccaggagttaagaccggcctgggcaatgtagtgagaccctgtctctacataaaatagaaaaaaaaaaaaaaagattttgagccaggtattagcctcacctatgaatgaagttcagcatatctaggagagtgctaggcacagtacttgtaggctttttacatgttacccctttaatccccacaactgtccaacagagtctatttcatactgattctacaggtaagaaaaataaaatttaggaggttaggtagttgataaatggaggagttggtaatttgatctaaattggtctggattcaaagcccattcttcctttatatcaaagtttatcccatcaccatatagaaatggaaattctcttctaattcttaaataggttatagttaccatgggagtattctcccccttgctctgactcaagccacatgctgaagatgatgtgttacgaataaggctgagaccaggagactgggcttctgggctcagctctgtttctaactagcaagtttgcacactgtctctgtaggtctcacacctttgtccctgtggatcattttcagagctatattctataagtttgaggacaattattatggctccttttatattagtatctactgtatgctcagcacttgataggttatctctagtacttaaactaggatacagattgtctccaatttagaagtgaaaaagctgaggcctggagatttcaagcaacatgcctaatacctctcagtccacaaaatggcaaagctgagatttcgcctgaagtgtgtctgactctaaagctcatgttcttgccatcttaccagctgcctcatcctcatctatagcctcatggtggatcccgcttacaggtgcatatggtaccgtatgctagtatttatcaaactttcaaaacctggatccagagtaaaacatgcattttatattgatttcgagaattgtgcacacacacacacatttgcatgcgagtaccatgtatatactgacatcactcaaacaagttttgtgaaataatgctcatgttttctacttgctgtgccttggctttcttttccttttcactttggtttagtctgtcatattaatatgctcattaaactctgatgaattgatttaactacccaccaatgggttgtagccctcagtttgagaagcaccgctgtaaattatatacctaccttaatttcttgataggattaccccaaatcttatattctccttctttccttattttttattctctgaatttaatgaagactatttctctgattatatatgtaatggtgttaaatctaaatcaaccccccccgccccccgccgccatatggcaaccacctttctgcaaagtgggaaactatcttataactttgttctgagagaaggaaagaaaatatgtatttttttcatttgatgaaaatgctaatataacaagggagggagaaagaagtgacatttgtgtttccttggcttgagaagatgagaatgtaaggccaagaaacacagacaagttgaaatgatgtaggctggggagggactgcggcaatagacttacagtaaaagaaaagtgaaactgatttcttgttccaactcttccatttagcatttattggactccttcatgtgccaggtacttgtgttttgcatgtattatctcaggtgaggagacagaggtatgggaggctgagttacctgcccaagattgcatggttggtagagagtggtctagcagactccctggagccagtgctcgttgtcactaggccatagctgccacttgtctcaacttttgagtaattctgtgtggtctttatttggtgccaggcccaggaggggacttttgcgccctaggctttgaatcttgagagggaacatgctagggtggaagattggagtcaatttgttccacgagggcagccagaggaactccttattagtccctgcttctcccatctttagagttgatttggtttctgtctctactgagttctggttgttcttttgattacaagaactactcaatttcctttaagtaaatttatttattcttaaaattctgttgcttgaaactaagaataagccctaataggcacagaggaataatttaactcttcctgatctgtttcctcatctgtaaaataaaggaaaagggcacacatatcccctgacccctcttaactctctcatctttagctagaattgggttctagtgattctcaaatggatgtgttctaaaagaggctggctggccctgtgttggggaagcagaagttttagtaattaattaggttaatatgaactttatagttatattttttctgtattccctgaataactgtgactctattacttgtgaatttatttaaaacataaatatgacagtgatgactagatgaggtctcttagcacacatgccctatgcagacctgtgagtcccctgctgtctgctcacccaatagttgagggcctgggtaggagttctgccacatgtgagttcttaacacaaaatcctcatggaccctgtgggcctggagctggatacttcactcatcttcacccttggcctcatgctaagaattaccatcctgccaccacttaaagatgcccattcatgttagtgtgtcactgctaaagtactgtcattaaagaagacctatcattactctgactttaaaatacattgttctaacagaatcactatgggagattccagacttctgtatcagcgggtgctttgaaaagaggatctgatatgtactggcccctgtgttcacctgtgggcgaacattagacatgtttgtttcttttatgctttgataacaccttacaacttgcaatagtgtgactttggaaagaatgaagtgattgtgtctggcatgctgtatgtaaacattccatttctacataatgtgaaaaggaatgaattaggtgaaaataaatggatttgcacaggtgttagagtacgtagatttcctctgaaactaaacatccgaatagaaaacgaaactcagtgacttcttgaccgcctattgaagaagcacctgttggtccagggagcagagatctaagggggaattaattcctctcagcaaatatttaccgggggcttgtcattcctagaagtccacccaaaaagagtggggctggaggagaatcccagagagagtctaagtcatgggctcagagtgtagggaagtgactttgagacctgttccaaccaaacctcttattttaaatttgggtaaaataaggtctctagagattgtaacttgttcatggttaggccacttggctaacttgaggccagactcaggctaaatctggataactctcttcttggtttactactattatagacctaaaattttattatgatattaaaatgtaaataacagtaacagacaccatgtagcaattctcatgtgccagcactcttctgagcactttaggtgtattaactcatttaaccctcatcattccatgaagtgtaaatatttctctcatttttaaagagaagagagcctggtgcagtggcttgatggcccatgccaataatcccagtcctttgggaggccgagctgggaggattgcttgaggctacgagtttgggaccagcctgggaaacatggcaataccccatctctgtaaaaaattaaaaactagctgggcatggtggcacatgcttgtaatcccagctactccggaggctgagaccagaggattacttaagcccaggaagtctaggctgcagtgagctgtgatcgctccactgcaccctaggtgacagagtgagaccctatatcttaaagagaaaaggaggaaattgaggcacaggaaaggtttagtaatttgctcttagccatgtatatattaaataatggagcttggtttcaaacccaggcagtctaaatctacaatttattctctaaaccactagaccaggggtcagtaaccatatcttgggctttatgagccataaaactctatgtggggtagtgggaagaggctgggtttgacttataagctgtagtttgcaaaccctacactaggctgtatagcctcactggggcacatccattaatatcaatgtatcccacagctgcccatgaagagtgaagctctaattttgaaaaggattttaagtcaggaattaaattaaaatgtacttttttggtgttccttttgggtgaagtgtcctcctgccaggaaggatgatgttcatcatagctgagtatagtgttaggaggctcagagccaggagagaggttttattctccttcagttttctgggtgaccttgcaaaagtcccttatcatctgccacttataactctgcagtggtgataatgtgcctcaccacctgcccttctccctcacctaggtatatgtcttggattaatgaggttttatctgtaacgtacttagagctgggagtttggaaggggaaagtattaagagggggaatgatggcattcatcatttagtttgcttgcaaattagagagtgcttcaagggtgtaagaccatttgttgaatgtttggcacgtagagcccaattttaaagaaaaggcactcctggtaatctgcatgagagaatgtggatttagagagcatgaatttatggattgcctgtgctgcagtaggctttaggccatggagttatttaagatggtatgtatttatttcagtttctaataagtgtgcaatgagcagattccatagttgacctccatatctccataagaaaacataggcttctctgctaaactgtgagtcttaacagtaaggaggacttataaatgtttctaagtgaaattatgaagttaaaagttgaaccaagaagcctcagagggaactggctgctacttgcatttcaatgaaaggcagaggaaattcattacagaggttgaaaatgtggtttgcatgttaaggctgcagtggaaaaatgggccttcccaggggaggtgggagggaagttgtagcttaccctttgtggtgaaggttccttggctaagcacatatactccatctgatgcaccctaattttttttttaactttgcaagaaaattcttcccttcaaagccaaagatgtgcattgaacagaaaattgcagcctaggagaagtttcaatatctttgtattttttgtttgttttgttcttttgacaaaaacaattattaaaaaattcagtaggtgaagcaacttaatcttactttgtgaaactaaatctaagatgctattagttaagttataagaagagctggtgtttagcaaaggcatattaggttctggggtagggctttatctgcatttgtatcttatttaatccacacaacagtaacagtcctgcagaggaatattcttgtttgagcatctcttgtatgaggcacctcagtttgctcatctgtaattctgtaatctctaactctctagagataacaaaagtctatcaggtttaagtggcagagccagaatctgaatataagtctttctgattccaaaattcaagctagtagattgaccaacagtcccagttttctgggatgcaggattctcagccctgaaactagaaacgtcttatacaaacagaaagagttggtcaccctacaagcaggatgcctcccatcccaggcactgaagaagtattcattatcaggaaaccctttttggtaagtcacagaggatgtgtcctgtgcaactgcccctgactctgctagaaaccatgtgtgtgtactataaatcctctgaagctttaaatcctagggcagttttggagccaaacagagaggctgggagactgagttcattgggatttctagtatgaatgtagccccattaattggctcggtttgtgttgataaaacaagagtcacaatctgacttgtaacagtagtatttgtaattttcattcttgctttaaaatattgctgccctgttgtacccacaagtgggtacagttttgggaaagcttggaagatttcctctattccaacccccatccccttccacattttctgtgaactctctgtgtctctggaggctttcactgaccaccagaaatggggaccatcctgcacaaagcttttgtagcttatcagtcttccttcaaagcctgggctcccttatgaatgtgtttcttttcagacaaattattttgatctgtatccaacttctgaaggacactgtgtacttccactgcctgtaaaatacttttaaagaaagggagttgacacagagggccacagattgtgaaccttattattgctggggtgaaggtagaaatgatcattagatcctcatgtatctacctgtagttacaaaattaatctttactcaaaagatgaatccatatgaacattctggtttcttttttctactctttttttttctatttcattttttatttttagagatggggtcttgctctgtcacccaggctggggtgcagtggcaccatcgtagctcactgtaacctcgaactcttggactcaagagatcctcccacctcagcctcctgagtagttgggactacaggtatgagccaccacacccagctctcctcttgttttaaatattctgaccctagttcataccctgtcagtggcctctagaaacttcctatggtgactgttctggaaagggcaagtcaagagaagacaagcaggtcacctgactccctccctcttcctctccccaccccccacccccactcccccactggtagtgggagcgttattccctaaagtgcaacaattgtcaaaggatggaatggctggctggttccttgtgttagtgattgctgttgtatttcagttgtttgggtgcatgtttgagattagtttttaagacttattaattagattcacacaggggacgttgtaatcacttaatagccaatatgctcattgtataatgatgtcaaaaggtgtctaattatttttggttcatactttgttcacgtttttctgtaactgtgttacaaatgaaatacttttctagaatgcattctttcttctgtgattggtgtctattgtcttgcaaaaggaataaataaagtaacaagttctcaagtgattctcatggagaaggggctggggaatggagggcagaatgaaggcaggggaggagcgcaccagaagagggaaaggagatggagcaagacggggtggagtgtgggggacactggcagcagtagcagagagaggggtcagaggaggggtggggagccagtgaggagaggcacagatagactgagaggtacatacgtagaatcatgtagacagatacagaacagagataagagagaaattcagagacacagagactaacagatgatggcggtgcatagaaagagacagaaggagacacgcagaccagtagggattggtccttttccttatgatatccaaacatctctcattgtactgctggtcattttacgtgtttgcttctttctggctttaaagctccatgactcatctatgtttccatgtgtgtggactattgaggaatctgttttttggaaaggtgagctttgacagccagtataagtcattaggaacaccatctctggaaccagaccatccaggctcaaatcccaactgccacctacttgctggatgacctgcacaaattacataatctccatgtgcctctgtttcttcatcttaaaatggggattataatagtgttttccttatagggtgctgtgaggattaaatgtggtaacatatacaaacctattagaacagtgtactcaacaggtactggcaattattactatgtttgtgaaaggatcctgaattcctttgaaggaaagttcacagttaaatatatttttatgaatactgaagaggctacaagttcctgtctttgacttttggccttgaaccttacttttaatgtaaggtgagagtggagagttaatagactgagagtgaggagttgcagcttctagttccagctctgccactgactagctgtgagatgatgagtttctctggacctgctgtcagataatatacaaactcagggaattttaggtctttgacaatgtgatgttgagacctttctggcatacgagttttaggatttgtctgttattttacctctatgcagaggttttgtggacctaagctttttggaaagattggggattgatcataccagtacccctgggagagagaaatgtgtgtgctgctttgtaaataataaaaagggagaaatggtgagaataggggactggcttcctatagccatgcttatgatcatggttgtcagcattattatcttatttctttttcttttccactctgggggaggagcagtatttgaaagaggggtcatatcctggggctaaactggagtagaaggtgctggatgcactgtggagcttagttcagagaaggtgaatatttcatcctgtaagatgagttctaatcttgtattccgctccccagacctaggcaaatggcagtgcaagccaagcgtatctctggtgccttttatctccctttccaaattcctctttattactgtcatgcttcttttgattatctgatgcctgttatccaaccctgtgtgtctcatgcaacaaaatgatctcctgcccttttgcaaaaggcctgcaaactcttaattccctgagtactgctgtattagccaaagattaactagtgctgatgacagaagagttcagctctccagggcatacttggatttaaaaagagcattttgaaaactgttggaatgttgaaaaaggtactccttcaagctgagagctttgtggatctcttccagtcatggctgccctgggctatcccttcctaccttcacggtaactgatcttccaggggctagagcacgaggaggcaggattgagtagtaacatataaatatagcctggtggttaagaacattggttttggtgttaacaaagctgtaagatttaaattatactcttcttaaggaccttttgaactctgatgcttttataaacgatttctgctctaattgaatgaccttgaagtgagttcatcactgagtctcaatttactcatttgaaaaatgggaataatgacatcaaatatagttgttgtgaggattaagtgtgccactctcctcaaagatattcacctattcatggcacatagaaaatgctcgacaaagagtagcaacgcttagggacagcttttatggcttgcaatctgtacagttgcacaggacacatccaccaggggctagagcacaaggaggcacgattgagtaataacatgtagacatattgtggtggttaaggacacaggctttggcattaacaggtaaatgcagccagaaagtggcagagccagaatctgaatgtaagtctttctgattccaaaattcaagctagtaggttgaccaacagtcccagtttcccgggatgcaggattctcagccctgaaactggaaacaccttgtgcaaacagaaagagctggacaccctacaagcaggatgccttccatcccaagcatgtgaattctgtttctcccctaattatatgaccttgaaacgagttcatcatttccctgcattgggttaatgccttattgttatcgtcttgaaattcttaatcatatttgaacaatgtccctacagattatgtagccagtcttgctactaccgagctgcacttgacctccccgcactcatcctggccatacttcatccctgtccctctcctttctactgcctggtgctttgtcccatttccttgcccccaaggccttaggagggtgtaaaaaaaaaaaaagataaattcctcagggaaaagatgtgatttggctcacagcatatggaatattcaaagatagacatcatctgttgcccacatttttatgagactgacatgctgcctgtagcattgagaaggcactggttgcctacacttttagaagtcatttattaatggcttcctagggcatgccaactctaaaatcaagccacaaaaatgataccaggtaaaaattgatcctgtgaataactgtgacggtggcatttgggtgaaaggtcttgaaatgggctgtgtcttttccctcaactttcctcacccgcttttatcacactctcccagccagtgtcagattacttctcttctcatctgtctcataaatagttctggcttgagttatcccctaccgtgatgacatatgattattcaaagaaagattttatagaaaatgcattgtttctatttggagttgggagactagggaaaggtataaagcacgccacaggggcacagccttgattgactttctgtgctcagcttagccgttcaagcccggggttgtgtctgggtaaagctgtttgactttgggtaagtcctttaacaacctgaggtcccagtgttcttaactttctacagttttgttctaatccagcattcttgaactagcacataagcataacttgctaaataagcaccacttgctaaatacaggcttagtgacaaggaagttatttggaaaatgaaaagagggcaattctcccatcaggacttgagaagccttggagttttctttctttattgaaaagactcatgaggcctgtccaaatctcaaagttgcagagtggaaagttttgtagtaagcttcatggatgtgggatcctggctcaagatctgaactcctagctcagccccttagtattcatgagggcctctgctaagtaaaaggaacctataggcatatgggaccccacaggctgtatgtatgttcttagctgagtatcaaaaaggaaacttccataaatgttctaagactgagagaggcacagctgagaagcaaagttagggatgattttttggaagcttagcctgattttgctctgtgcattatataaatgttagctggagtacaaagaatggaaagcaagagggcaaaggtgggaggtgtttgtaatttgggaagtgcaaatgagtacttagttgttgttttttttccattaagtttgctgttgatatagtgagacttgtgactatgtatcttatgcattttagtatcacagagacctgttttacttaatctgaataatctgttgggtttttgggctgctgacagatttctcatcttgagatttcacctgtgatttgttctaaaagaactttgatacagggactctttaagttaaaactaattctgagaccaagaagctgtcccagctcgtaattcttcttacatgacaggagccaagccatgtggccttctgaggtttcagtatcattaaagtcccgtggaaacaccaaagcccactggccccactttttggtgcttatactgatgctgctgcttctgtcttacaggtccttacatcatgccgagccttccttgtaacagcgcgaatccccaccaaggtaagtgttgatgaagtccttccttctgcactcacactcactcatacccactcatgcatagtcactcatgcattcttacatgtgtgcacacatattccttcatatactgcaacacaacacacacacacctcacttacatagacttttgatttaagctgtgttcagatttctcttagcacattcaagttttccttccttcttcccagaagcacctaaaggctgtaatgagaaacatattttttactcctttgttccctctctttgtgtaaaggcatcccaagaaaatcagtgaaggattttgtgctctatgtccctaaggctccatgtcccagttatttttctctctcaactggggcttgatttccactttattcaagtctacttcttatttccttcggtgatccgaagtactggcagatttttctaagacttcagacatgtggggagtaactttcataactccaaagaatacactaccagaaatgtaaccatctcagctgttctccgtctactctgatgttgcctgtaagaaataacaagatgccactctgttctttaaaagagatatataacatttttcataagatgtccttcattacttggtgcagaattcgaactgatcgtttgtggattaatcataataatgacttattttgtttatgttaactaaaaggagtttatcatttttatatgatattgactgaatggtcataggaaattgagatctttttcctaaaaaggtgataacatttactggagtgttgttttagtagataacttgatccttaacagaatctcatgagagctataagtcttattattatcccctttattgatgagaaaactgaggcccaaggaggttcagtaacttgaccaaggttaaacttccactagtatgtggcacatgtgtgattctaatcaagggaggctggctgcaaagcctctgcttctgttattgctagaatctaataagttatttactaagtatgtaaggatacagtctcatttaattctcacagtaacattgtagatgagtgattagaaaatagctaaaagacagacacttctcaaaagaagacatttatgcagccaaaaaacacatgaaaaaatgctcaccatcactggccatcagagaaatgcaaatcaaaaccacaatgagataccatctcacaccagttagaatggcaatcattaaaaagtcaggaaacaacaggtgctggagaggatgtggagaaataggagcacttttacactgttggtgggactgtaaactagttcaaccactgtggaagtcagtgtggtgattcctcagggatctagaactagaaataccatttgacccagccatcgcattactgggtatatacccaaaggactataaatcatgctgctataaagacaaatgcacacgtatgtttattgcggcactattcacaatagcaaagacttggaaccaacccaaatgtccaacaatgatagactggattaagaaaatgtggcacatatacaccatggaatactacgcagccataaaagtgagttcatgtcctttgtagggacatggatgaaattggaaatcatcattctcagtaaactatcacaaggacaaaaaaccaaacaccgcatgttctcactcataggtgggaattgaacaatgagaacagatggacacaggaaggggaacatcacactctggggactgttgtggggtggggggagggggggagggatagcattaggagatatacctaatgtaaatgacgagttaatgggtgcagcacaccaacatggcacatgtatacatatgtaactaacctgcacattgtgcacatgtaccctaaaacttaaagtataataataataaaataaaataataaaaaagaaaatagctaaaagatgtgaagttggctagtctaaagattcaaaagtaatgaatgggagaaagagaaattagactcaccatgtcctacttatttagactttttactgagctgaactgcttcccctacctgcatatccaggaaaatgggtaaggtctggtagatgctttcagccttatcgtgctatgatgtttgggccgcagtgttatttgctcattagtcctttcttgtttcttaaaatttaacatttagccactgttttgtaaattctgacttaggtgccaagttatggcgctataatgttattggtacaaatgaaatggatcttttgggacttgcagtctcatgatttgcactgacttttgggaagatgccaatgcaatgtttgctagttataggcttaggatatctgtggcctttcttttttttttcctcccgatcatacaaatgttaacttttataaagtttctccaagaaatgagacttttggcccaagcccctttagataatataaaatgagcctatatgtttattatgttttataaataaattaggtcaatgaagttggactaaactatacgttaaaatacctgaaggcatgatatgaggactttaattagacattatcccactggtaagatattaattacagaaggaaattttatgggcttaggaaaatattcaagcaccctattgaatagaagatccctaaaaaatatgcataccctaacatgttgtgacacagtggaagtgtgttacctcttgtgaagtcacctgcctgccttctgctggatgactttatatgactttattctgccccctccttgctctgcccctgaggaaaggcttggctccgtcctgtgatgtatataatgtttcacagccagcctggccagggtagtttgaacattggttctgatttctgatattgtcagcatcacaaataaagaaaggcagattttcttccaaagtgatctgcttgcagctttgccgctttcccccttagagaaggctggttttcatgtgccaccttaagtcttgactgagaagtaaagccagtgtgaatgatactaattttctggagaaataagtatatttataacattagtgtaaagcactgactatgacatagatgtcttttctttggaagctgattaattaaacatctttcttttgtcattttattgtgaaatatacaacatatatagtcaaatgcacaaaacggacatgtgcatctcagtaattaactacgaagcaaacacttctgcagtcacacccagataaagaaatagaactgtgccatcaccccagaaggccctaacttttctttcgggggttgggtaattatgagatcaaagaagggtttgcggagagggccagttgaaaaatcacccatcagccgggcaaataaagggttttatactggccaaaaggcttagcagtttggaagaccacagtgcatttggggagctggagtgtgggctgaggattgtggaggaggcggtggtgggagggaaacagctcagaaagacggacagggccaaggcctggctgaggagctgaagcatagactgctgcctggggaagagcgggagttactgaagaacaggctccttatcactttgagatctgctctgttgcttgtgggatgggcactgtcttgtgagggtttgggtgtgaggtgagcaagagattggtggaaaagctattgacagtctgggttaagtttttcctcttatctaataattcactaatttctgtggtgatatttaattagtgtaatttctaactgaaaaatgtcctcaagtcttcatgcagcctacatctgcctcagcttcttaactggtcttcctgcctcttcctgcccataaatctaatccagtgacattctttaaactgtctttgggtgggttggagtagagtggatgatgggttgcggggaccaggagcaaaggcctaataaaaatagccatagatgagataggagagaatgatttgaaccttgctgtgacgtctttcagtatgttttagagacttccctccccactattaatgataacctgggacttcaactaatcacagactcagccagtcatccttgttgattactaatactgcaggatctgctccttttagtttcttccttgtcctagttcttttaacacctcgatgcctttgcgaattctttttcttctgcctgaatttccctctacactccttgtttgcttgaggaacttgaagtcattcttcagggcctagatgaaatgtcaccactctttcctggctccccagcactttgttgttctactccagggacagcactcaggtacagtagacgcatcttaattgacctccaactaatcttgctgagccaaattgaccaaaggtggccattcctatccctgatgatgctgactgatgctagctgcattttcatagctgttagcatgtaagagagggtacctgctcacacctattcacacctgctaccacccactgaatgagatgctcattgagggtcatgggtttattcctaaacctgtttatagcagttatagtagcaaatgtttttaatgcaacattttagtgaaagatattttatgtagcaataaaatatgagtgcaaaagaagagtgtctgtgacattgaatattgatgaaagtgaattgcttaaattgctgttttaaagactagacaactttatagttgggggaggggtggtgaggagcataataatctagaaaacgtctgctgtcatattactttgcaagtattttgcagttctgcatttttaaagagacttaaattggaagctggaagccatacttgtgagtatggcttatgcagaaaggccactggagggccagccagtgggcttaactcaaagaaaaactttggcacagtattaaagggtagtgaatgaatatttattcataaactttaaattaaaataatgaaggaaggtatgtatactttttagaaaataatttcctgctttaaatgacttttcaaaaccaaattatgtatagatcttgataatgataggcaagaaaacttctactctaatttaatgcttttaaacatgtgccttaaatgttgcatttagctcttggaggacaaaacaaacgtctcagtactctttgtatttccaatactggcacatagtgggcttttcataagtgtttgtcagttgaccaagtgaataatgaatgaatgagttctctttctacttccagagctcatcagtatacttcatgttgtttaactggagattcaggggttttctgcccagtatttacttccctccccactattaataataacttcatcagtatactttgagatgtttaactggagattcagcgtttttctgctctaaaatttattctaccaacgtatcatggtacaacataccaccagggagcagaactaaatctcttgtgggtttggttctggatgtgtttttttatcattatatttctcggtttaatgtgggagggtaaaaaaattgatccaacttggtcccccactgtctctagctccatgctctgtgattatttgctgaaatggggaaaatccgggaagaaagattagtggctgtttatcaggaaaaacaggtagagagtgaaagactggggatattttaaagaaaaagaaactgctgattacaggagaagagaggggcacttgttaaaatagagaggaaacaaatcatcatttatttacatgcagagagagaggacttttgtttaactctgtgtatttcatttaagcacaacttaaaattcctaaatattgtattcgtgtaaatatggatttaattaggataagtatagatttatttctctaaatccattcaaactgtgcatttttatggaagacagtagaaggacggctgactctggtaagtggtcagagtgtaacaaatagctgaaggtttagaaagaagggaaaaacaacattgactttatcctgataggactttctgaagcaaaattttgaagtgaaaaagggaaaaaagtgtttagatggttccttccatacattcatttctcaatgaataaatagtggttaagtgcaaaaacttattaggttcgtgccaaagtaattgcgttttttgctattacttttaatggcaaaaactgtgattgcttttgcaccaacttctactattgtgtttgtctctggatataattttaaaagttgtgcatgcagcttcctttcttttcttttttagtaaagtaacaccttttctgaaatttgataaatcatgtttctatcttgttgaatgaatggagatattaaaccagcccgccttcagaagatgcccagtgtcttatttgctcttgggctgtttctagttgtaggatttttttttttttttttaccttaagttatatgtttttttaaaaccctcattgcaggtcttttctttcctcctttcccctcaattgcagctcgagttaaccttcagctacttggagattcatggcgtcgtttgcagcaagtcagctcaggtgagtgtgaaaaatggatcactgcaagatcatgatctttcttgaattcttgaaaccctaaaatgttccttgagacaatgtggataaacaaggttagggaagatgaaatttttgaaatgagagactcaacactggctgtgtggacaggagttgggaattcattctgataaggaaaacacattctccataactcagtttgtgaagaacaaattagctcttatgataaccggcagtgtaaacgtgagagtactgttccttatagagtttgtacaacatgctttaacactaaaattgcatagcaattgtatagtactatataagggcttagtgggaatatagtgataaatgaattttttggatttattaaaatgctgatttaaaaaaatagctttattgggctataactaactgcagtaaactaaagtgtacaatttgataagtgttgacatatgtatgactctgtcttcgccctcttccccacctgcagtcaatctgcaggtatctacttttggttgctgtagtttgcattttaaaaattttatatgaatgatgtcatacaatgtatacttcttcctgtctgccttctttcagtcagtttaattattattattttaatttttaattttatttttagttctggggtacatgtgcagggtgtgccagtttgttacccaggtaaatgtgtgccatggtggtttgctgcacctatccatccatcacctaggtattaagcccagcacgcattagctatttttcttaatactctccctcccccaaccccagtttaattattttgagattgatctactttgttgcatgtctcaatagtttattctttttgttgctgagtagtgtttaattgtgtggctatattacagttcgtttatccattcgcctgatgtgagggacatttgggttgtttcccatcttggctatgatgaataaagctgctatgaatatttaagtacaagtttttgattggacctgtactttcatttcccatgtgtaattacctaggggtagaatggctgaattgtatagtagctatatgtttaactttttgagaaaccgtcacacttttccacagtggttttactattttacattgtccccagcagcatatgagagttgtagtccctccacatcctccccaacactggtatagtcagtctttttaatgttagccattcaacaagtatgtagtgctttttcattgtggttttaatttgcatttccctaatgacagaacatgtggagtatctttttatctgtttatttgccatcacgtatttccttctgccattacagaaattgggctgtttgttttcttattgaattttgagtttttaaaaaaatacattctggatacaaagcctttatcagatattttctctcagtctggtggcttgtcttttcattcccttaacagtgtctttcaaagagcagaagttttaaatgttgatgaagtccaatttatcaatgttttcttttatggattgtgcttttagtatcatattgaataaatctttgcttaacccaaggtcacagaatgttctatatcttccagaagttttacagctttaggttacacatgtaggcctatgatccattttgaagtaatttttgaatataaagctatgtatagatcaaaatttttttttagtttgtcttttttttctcatatgtgtattatattcacttgttccagtaacatttgtttgaaagactattgtttcctcactgagcttgttttcacctttgttgaaattctgtagtccgtttaagtgtgaatctatttctggactctgaatcccgtctccttgctactatcttcatgccactcttatactctctttattattgtggcttgtttacaacaaaatttgaaatcagatagtgttagtcctccaacgtttttcttctttttcaaaattgttctagtgattctaggtcctttgcaattccgtatgaattttagaaacacctcagtttctataaaaagcttgctggaattttggctgatattacaatgaatttttaaatcactttggggaagagctgacatcttagtaatgtacagtcttcggacctaagaaaactatatatttctccatttgtttaggtctttttcagtttttctgagtgtattttgttgtagctttcagcgtactggtcttacatatgtctaaattcattcctaagtgtttaatattttttgatgctactataaattgtgttattttttacatttcagttttcagttgtctcttgctggtattagaaatataattgatttttgcatattgaccttatatcctgtaacctgctatcttgttctactcacgtattagttctagtagcttttaaaaatagacttcatcattttttacaaagatgatgtcatttgtgaatatggatgggtaccttttatttttaacatgggtgccttttatttctttgtctagtcttattgctattgggagatattcctccattggtggagcaattcctacatattttgctgggtatgccaggaatttagggctgtgacttctctttgcccaggctatttctcagggttgatagcaatgagcatcttgtgggatggtggaatagttccattgaataaagaacaggcttgcttacttcttaccatgaaaacagtagatttccaatgtccaagggttcctttcttgtcagcagcctactgtgtgtgcaagcatccatctgaagcaccatatgggactttgagggcaggggaatctatccaaatgtggtacacatgccttttgttgtaccatgaatcataaaatcctatgtctctgacccaggcgtctcctgtcttctgcagcatcaatgaaacatctaataggctaacttactggcctacaagtagggtaaaaactcagaacttggcaattgttctggtacttataagacagtgctgaatggaagtggcaagagcaaatcttcttgtctttttcctagtctttgagggaacgcattcattctttcaccattaagtgtgatgttagctgtaggtttttaaaatagatgccctttatctggtttaagaagtttctttctatttttagtttgttcagagttttaatcaggaattagtgttggattttggcaaatgttttttctctgtctgttgagattattgtgtggttttctttctttttttaagcttcttaaaatgattagttatattgattaattttttgaatatcaaatatttgattcctgggataagtctcatttggccatgatatataattattattatatatatatttttgagacggagtctcactctgtcaccaggctggagtgcagtggcacaatcttggctcattgcaacctctgcctcccgggttcaaatgattctcttgcctcagcctcccgaatagctgggactacaagcacgcgtcatgacatccagctaatttttgtatttttagtagatatggggtttcaccatgttggccaggatggtctcaatctcctgaccttgtgattcgcctgccttagcctcccaaagtgttgggattacaggcctgagccatgatatattatttttttaatgttgaattccaaatattaaaattttgtgaagagtgttttgcattgatgtttgtgggagttattggtttgtctttttttttttttttaacatttttggctggcttctctattagagaatcatagatttatagaatgattctatatatttctcctatatagaggaggaagtagttccttctcttaaattttttctgttgagatggtattaatttttgtcttaaatgtttacttaaatttactggtgaaattatttgggccttgagttttctctttgagaaggtttttttttttttttccagacagggtctcgcactgttgctcaggcaggagtgcaggggtgcaatctcagctcatggcaaccttcgcttctcgggaccaagcgatcctctcacctcatcctcccaagtagctgggactacaggcatgcaccaccatgcctggctaatttgtgtattttttcctagagacagggtttctctgcattgcccaggctcgactcgaacttctgagctcaagcgatccacctccctcagcctcccaaagtactgggattacaggcatgagccactgtgcccaacctgggaaggttttaaattgcaaattctattaatattccttaatgatatagatccatttatatttcttttcttgaatgagctttggtagtttgtgtcttttaagaaatttgtttattttatgtaagttgttgaatttattggaataaagttgttaataatatccacttgttatacttctaatatctgtagagtgtcattcccaatattggtaatttggttatctctctctttttccatttcagtcaggttagaggtctaccaatttttttttatcttttcaaacaactttttttttattattatactttaagttttagggtacatgtgcacaatgtgcaggttagttacatatgtatacatgtgccatgctggtgcgctgcacccactaactcgtcatttaacaactttctttttggttccattggttttctttattgatttcattgattttctatttcctatttcatcgacttttgctctgatctttgttctttccttctactttttgttttagcttttaaaactacaaagaaagtgtgtgtgtgtgtgtgtgtgtgtttgtgtgtatgtggagtttgttcataatgttctttaaaattgtcaaaattgtcactatgttttttgagatttcatacaaactcttggaacttttccacagttcatcttagagcaatgttttattttatgtgtttatcattttccagaaactggagtttgaaagaaaaatcgcagcaacatatgtttgcccaaatggtcaaacatatgcaggagtgaatgatcactcgtgaatgatgacataatgacataacaagggtcttctcggtggtcttaattcaggaatgtttatgtttatgatttgagagctgggatgggagcagaagggcactagcgaaatgttaatgccaaggttatgttcgaaatatgatttcactgtgctatttaattatgagaaagagtgttgatgcagcaagactaattttcccatgtggctgccaaaattggtcttaccacacttgtagtcttgcccctttcaatatgcgtaccattcagaggaactgtgtataaagccgtctgtctcagcccctgtcagtgtcagtaccaaatgaatagctttacaacagtgcttcaatttaactttgacccacagtatggacctttgagatgaaattatagtgaacattggcactgcttctgtaaatggcctagcaattcagagactggcaatactagtaacctaatggtattcaaaatttgctgtgttttggaactgcctgtgattgtttttaaaaatatactttcagcagtacccttctctctgtcacatcatacttcctcattctcctcaaacacacacaatatatacttaggacagttacagttctatacatccgcggtggacgtttgtttttttaacaagtgcaccatttgattctgttgcattccaaaggttaagaaccagtgagctgtgtaaccagtgacctctagttttgattttcttttatataaaatcatgaggatgggaatatctaccagtggcactcagaatctagccttgattaggaattcttttgtaatgttctctgggatttatttttttctccttgctgttctttattatgatttaattatagttcataaactcagataaaattcctgagacttacctactgcattgtgtttaagagtgagtgattgctctattgagttagcgaaatgtgacttttactattgctattttcccctttcttcagaaatgttggaaacctttatcttattttaccagtctctatgccacattgttttctggtgctcgagttttattgccttcatggtatttaagttgaggccagcagttatacagttttatagttatacaatttttgcacctttttttgtacaactgaatacctgctatgattttttcttgaattatagggttaattgtttgctatgtcacagaatgatattgataagccatctaccacacatggatggataagccatccaccaccacatatttctgacagaggagagaaaaacaactcacaggtctgttagctggggattagtaaaacgtgctgcccttgaagtttagtcaggttgttcgaccttaaaaaaaggcggtggagtggggtgggaaatttgaatcatacataagttactatggcttatatctctattattttaaatgtatattagatatcatgggttatatcctgctaggtgtctaaagaaaatgtgtttcaaacattctgttcctccccagctgaagtgggagggaaaagagtatttgataggaagctctttttttcttttttgatgaggtgacttattgtgttggtttcacctccatcactttgttgcagtctttacattatgcaaaggtggtgacatcttacacagggttgtgtgagtgcttgcttgtaaggttgaattgaaggcctcatttcttcctccacctgtcaccattttttcttctctgtcattctattcaatcctgtgcaattaaagatgattaggtgttaagattaagtggaattagaataagctaattactaattactcgcacccaaactgtgaactgaatagatgtgctagatgtgaagaatgtaaaagtacccctgtagtgaaaaatataattacccatggtgggaaggttgggagtagggtgcagagcacagacacaatggcacatcaaaagtgtctggcttttaaaaacatgcatatgcacagatatgtgcatatgaaaaatatgagcctaatttcactaagtagatttagtcttacttaaaacatcttatagactactgggttgtttagcctccaggtacaataatgcttgatgtcttttgctagaggaatacctcttgaaccagcttttagaagacaaatggagcctttgcctagagaattttaaaggctttgcctttcatttcttgaggaatgcactgaaaaataggaattttaatttttttatgtacaactaactagcacagaagtggtatttatcaaatactcgttgacagattcttctagaggtatttatgaaaaagtaacatctgaaacacttacattatttatatccttttctttgatctcatcattttgacataccttgcgttacttttcattttgacatacatatgttgaaatacttacattattattattttcagtttgggctaatttcaggaaaatgtaaggcaaaatctaaaaactgcattgcacattataaagtgttctccatcatatttttgtatagataaagtaagaacaggaagtaaacgtgtgcagatattttgaagaagtgataatctaagaggattgcattttatgggaattttttggggggtaggaagatggggttttgctatgttgcctgggctggtcttgaactcctaggctcaagcaatcgtcctgcctcagcctcctgagtttacggggttataggcatgcaccaccacacccagtttacatgaatgtttttgagattaaagaaaatggcatcttttatttttaggtagttgaagttcttcttatttgtaatgtgtacatcttcagcttcttgccccttttgtgaccgacctgtcctccttttcacaagttagtttgtacttatttagaggactagctgtctcagtctcaacattttttgacatgttttggacatctccagcaattaattataggaatgagtcttagtctaacactaaacctaacaccaaacattttattaacgtgttaccttaatattccaagtatcccctcttcttagaaagctcaaaaccatttttttttttttttttttttttttagacggagtcttgctctgtcatcaggctggagtgcagtggcacgatctcggctccctgcaacctccgcctcctgggttcaagcgaatctcgtgcctcagcctcctgagtagctgggattacatgggattacaggcatgcattaccacacctagctaatttttgtatttttgtatttttttttctttttagtagagacagggtttcaccatgttggccaggatggtctcaatctcttgaccttgtgatccgcctgccttggcctcccaaagtgctgggattacaggcatgagccactgtgccctgccgatcgaaacttttaaaagcatttctcttttgctcccaagcaaaaggttttaacattttatttaagcatatgataaggtttcttgtctttaaaatgtgtgtgtgtgtattttaaaggtagcttttagattgcctatgggtacccacagaaagatatagccatacttacactacatagcagggatataaaaactttgtaagactgcagctcaggacaaaatcttggtaaaaggagaagtcgtgtttgaatgtgggagttcagtctctatcatatgggagtctatttgaatctgccagcttggcccttggaaacacttacttcagtttctagacgtttctgacaatacttccaccctctacccaaacacttctttgagtcttaaattaagtgcattattttaagaaagtgcttctttaaaagctaatattgtgatccttttgtagttcatgagggtgatggttgggtgttcacgcacgtatgtgagatgtgctaccctcgaaccttgttaaagaaaaaaaaagctaatattgtattagtatatatctgtgtgactatgtagtttacaatatttaaaataattaaaaacggaaggaattggactcattcttaagaagtgtcccaccggttcttgcagatgattgtggaaactgagaagtgcagcatttccatgaagatggcgtcacccgaggacgtgagtgaggtgctggctcacataggcacctgcctgaggaagatatttcctggcctctctccagtgtgagtttccctgggcagggtgaggagagcaaagaacctgttcttcctcaaaacggcaaatacaacaatgccttctttttaccccttcacttagttcctctctcagacttccttctcctcttaaatattaaatatcaaaacccttatcaaaacccttgtgttttggtctgaggatttctacagggctgtgtcttattctttaaagagcttgagtgatgaaaggatttggcagtcctttaacttctcataagactaaaacagtaacctttttaatataactccagatttacaggagtgtgaatattactcacagcttattaccagagtgccaggggctgcatgctttgtatagtggcaccaagtataatgcagatgaagagagagacagtgctttattttctttgcttttttattttcaggaacaagaaacctaaaaaaattgaatgtaaaaatccctttttttcattgtcctgttagtgttctgaaatacccattaggcatattagtaaatttcgttcatccatgccctcatattttttgttaagcttttaaagtcaggattatgggcttggatacctgagtttgtagttggggagtgtgtgggttgttgggatggaggaattagattgactgaggtgaaaggcaaagagatgcttatgtctgaaagctccctaaaataataggtatagtcaaaataccctcctgatagaagaacaggattcacagatggcagaaaatttccctcccattgctctcccagcaggcagaagtgtatacagggaagggctggaggccccacatagacatgtgtagcatgctagctgtgttccttgcgtggtggaggtgggagggggattttgggaacagttgcccttcataaaacatgctcctcctgcaatgccttgcctgcaagttgagagacaaagcagcaggaaaacctaggcttctagtcatttaaaccttatggatgactaaaagtggctcagtggggacagacactccctttcaagctctttggccttaagaggcctgctcagttcccttcacagcccttcgcagggctctctcccttccccccatggtgggaggtggacacaccagaatggaaggcttgccctgtgcttgctggttgttcaccttgggctccttcctccctgaagcttaagtcttgtggttctctgattatcagggtagctggttgccgggggagctaagtgtccctggcctccatttcagtggagtggagagggtgagctggggctgccctctgactcctgcttggctagaatttcaggtatgaggtgtcttcaaggcaagctttcctggtctctaatcacacacacaggcggttctggagaagaggtgtgggcagcagtgggtggttggatgaggtaagaagtgaatccatggtggcaatgggaattgccaagaagcaaaaccttaggaatgggttcgacatcatccttaaagccaccagagaactagctggggtaatcatgagttaacaatagctacaacccatcttccttaaactacatttcagtaatgcgactttgtacatgtgtttctttataatgtgctcgctttccttctaaattaatactgatgaaataaaaaaattattaagcaccgccttacttggcaagagcttataataccctgaactttaaagacacttcagagcaatatctagaatctctattttctttaaaaggcagccttatttgtttagtattgtaggattttcagagaaactaaccatttttatttttggtttggattcttccatttttttcttcccagagaacattgagtaagaatagtattttcacttatagcttccatttaacttcttgttaaaatcttcgggcaattattaaaccagtattaatcacctctgtttctaggaagaaagttcccatgtatatgttgatttctaaatctgtgacctctgctgtacccaggtcttcgtccccacctaccagctgcccaatagggcatctctacaaggacagccccaggcacctcacactcagtatgtcccacactggactcctcactttcccccctaaaaattgcttatattctgtatttctgtctcaattaatggcattgttgttcacatagtctcacaagttaaaagctgagccgtgctcatctcttggtccttactgtcatattcaattggttgctaagcttttaaaaatattatcttaatatctcgtggtctggttctttctccttgttttcatttccactgccatagtcactttctcccttgcatctttctagttagtctccctgcttctagttcttctcttgcaagtgatccttcatactgtcatccgagttatcttttcataattcaaacagtatctgttctttgcctaagctctcaaatggctggctttcctgataaaatgtaaattgtatagcctgacacagaataccactgttttcctgttcctgaacacaatcaggctctctcatattttcagcaccattataatagctctaatcctgacaaattccaaaagatttaactcaggtatcttctcatctgtaaagagagtctttattcatgtttccaaagaactttggatcacttcctgcactagtacacatcatactgtgttgtaagtgcttgttcatacacttatatattccatgactatttattgattttctactatatgctaggcatagtgctaagtgttgaggtccagcagtgaacatggtccctgcccacgtggaacttacattttaacttggggaaagaaaccccccaaagagggaaatacataaatcaagtaacagtacctttgagtaagtgctgtgagagaaatagatgggactcgtataaagaataaacttctgtctccaaaggcctccctgtggccatgataacttcaacagacctaggggaagagaaggcgcctgccctataagagtagggcaaagaatatcatcttcccagggcttctgttcatgctatttctcttgcctagaaagggcttggtatctctgagaaactgaaagatatccactttggctggggtataatgaagaacaaagatgggaagggatgaggaatgattcaagagggggctggaaccagccctggtgatgtagatgtagttgatgtagagcctcgtgggaaagaggttgggatttagtagtattttcctgggaagccactgtaacattttaggggtgggagataaatctttagatagtttatgaaaatctttttttttttttgtctgctaaagagaatggactggtggcagagcaagaatagaagtagaaagctaatttggacacttgtagtaatctaggcaagagatgactgtggtcaggagaaaggtagcagcattaggtattaagagagagggtagatgtaagctttattttggatgcaggagttgctgatggattaggtaagtgtgggtaagggcagtgaggaaagaaagagaagaaaaacaaggatggctcctcagagtccggttttaataacttggtgaccaatatgacagcaagacagagaaggcctggggtaggtgggggacaagtattttctggggggtgggatctgtagccattctgttttaggcatgtggaatttgagatctatttgtctaggacctacaagacctccatagacctctcctccaagctccactaggtgaggctatcaggtaggcagatttgtgaggctggggcttggaggagaggtctggagttggagcaaaggtgagtgccattgagcacaagatggtcttcactgcatggctgttgataacatcacctggagaaagatgtgtagaggaggcatacttggaatgagctcaacacttagaggtcaggtaaactaggaagagccacaaatggagttgggtaaggactggctgtcaaggtaggaggaaaaccagtgaaaaaccagggcctgggaaggagtgctgactctgcagaatgatgctggggctgaataagctgcaggcagagaggtgtccagtgttggtgacgtggataacataggcaccttgatgagagcaggtctaggggtctggttgggagggcagactgctgtggttgagggatgaactcagaagtgagaaaatggatgtggcatatgtggacaacttcatagagaagatcagctattaaggggaactgacaaattggatgtagctagcgcactctgagggattacgggggatttctgtttgtgtttaaaatgggagataaaagcatatgcttaaaccatatggctgtaatgaggggagtgatcagtagaaagagagatttgttgctggagactgccctaataaataaatcagcaatatccttgagaaagtgagaggcaaagtacaaaacatacctgtctttccttctaggctgggagctgcttaaacaaagaccatgtttttattaatcttaaatccctagttcttggcacatagtaggtactgactgaggttttggatgagcacatacacttcacacttaatccatttccagtaccttgttgggtgatgtaccatggggcatagagaagtcagaagacagtggccctgccttcaaaccatgaactcattagctgaggtaacctgaagcagatgagacaggagatgattgggtgtaagtgggagatgaatgagcacaggctggctttgcagaggagatttactgcaaacggatggagaaaattcagaggagagagtagtgaaaggaaaggcaattcacatgaagagaccaattggagagaaggtgcagattataatttagaaaatgccttggcagagagttaaattacctaaatgtatttgacttgcattcctcttttctacccaacacacacagttagcttgtctcgataagcctaatattttgtggtttctatgttgtgcctttactcttgaagttccttagattgcattatatgattttgggaggggaaacgtacaattttattggtattggttgtgtgactagagagggtggagaagttggtaaccgtatcttttctcctacattcccagtatgccttaagtcaaagctatcagtcaggggaatatttgtttatataaataatgcacaatagaacatgcaaaataaaatatgtttccagtaatgtcatatattccactcatgataaattggagaatatgaaactatatttagaatccttagaccttgtatgactcatttgtcccatcaaatttattttctgagcctgtcttgggggtcctcatctccttccttgcttagggtacctctggtggtgactgatgaacagaaaagggtctcatgaggaggtattaggaaccaggtgaatcaggaggagttagatcctggaaaattctcagtttgggtaatcagttcttgaatactctacgtatgactctatataaatgaacctatacctccaaagatctgaatttctgattttacccatatacaattctgaaaataacatccatcattcaaatcaaatatatgaaaatatacagcctgggcaacatagtgagacctcatttctactaagaaattttaaaaattagctgggtgtggtggtatatgcttgtattcccaactaatgggaggatcacttgagcccaggagtttgaacttgcagtgagctatgctcacaccactacactccagcctgggtgacagagtaagaccacatctcaaaacaaacaaacaaacaaacatatatatatatatatatgtgtgtgtgtgtgtgtgtgtgtgtgtgtgtgtgtctatgtgtgtgtgtgtgtatgtatatgtaatcagctcttaagagaatgcaggttggaaaaaaatgaaggatttaaattaaaatttgtagtatttacatgtcatattttcttcccatctcctgtctccaaatatatgttaggatatttctctctccctctctccttcccttctaaaatgacattttctcctcattaaatatggaaagtttaattcaaaatatagagaacatctgtaaagaagaaaatttaagttaaatttaaaaatcaccccaactcaaatcactgttatcgtgtgttttgttaacattccaatctttgctatagactgtccttggaggcctcacctctcagacagtgacaaccctatggggtgaactagggaagggtttagagcttcagtgttgtcatctgttttctcagggttgtctgtgatggcagttctcttcaggaagtcattctgtgttacggccttcagcttttctactatcaagaaccttggctggtctccaaaacaaagctagattttttttttttagtattaaatgatattgttaatacaggtatgaggtatgaaaatgtgaggttattatggagaaagctgatgaaataggagtttatatataaacaagagaaaggtggttgctgtgttttggtagtctcttcactttgcaaagcagtaggtagccttttgttgtggtgtggcttgcagcattaaagcatgtgctattctggagacagctgccatgttgcataggctgagcattggaattgaattttaaagaaatcaattagtgtgagtacattaaaataatctataatttttttgtgtcaatagtttatcatgagatttgcatggacaaagagttggtgtgtttgtcatctagtttgctgtttcttgctgccacatagaactattttctgagtcttgtgcaatttaaatgcatataatgcaaatgctgaatcaacgctagtgctgcctgcatgtgagagacatgtcttgcttatgttttgttttaggattttggtttaccttttatggtacttattggacaacaaatcctctgtctttctgtctatttaacagtgtgtgtgtgtatgtgtgtgtgtgtgtgtatgtgtgtgtgagctggtgcccggtaacaaatacactgatggggctccttgctctcatttcactacaggcggaaaacaacttctgtagagtggattctcctctcacttattatttctgtgcacagtgttagcatagataagaaacagttcctaccttctggaaatttagtttttacaactttatctcttatggaaatgaatgaacttgtttcatgagactactttagctcctgaaatctcagttgaaaaagaaaaatgagaactgtaaagaagcggagctacttgaaaaggccccgctggacacgtctgcaggttggttcgcacagatgtctcccctagctgctgcctcctttactctctgattgatttccccttaaccctgagtgtgaatgtccacttttgtttttcgagtaaaactgaggctctggtttccaaatctaccatcaagattaatttatttctttctgtagttgtagactgtcagcttcctgtttttaatcccaccagcttccggtcaaagatttttgccatattttcttcctgtgtttgagtagctgaaccccctatgtatcatcaaaagagcatggcctgcagttttatggaaacaaagcaagaattttaaaagagaaatgtgatcctagatgaggtcagacagaagtccagctttctgtgtccaaggtttacctaattgagttgaataatggctgtgcctacttctgacagccttgctgtttctttgcataatatctgcttcattgtcttgatgtagacagaatataatgccattaaaatgccagatgatggttttgaaccaagatgaaccattccaaattgccagattctgtaatatcattttaattataatgtcttctcaaacatggttaccccgaagtattaaaataatggttcttaattacaggttcctttgggtaaaatagacaaaaatcatgctgcacttgtagatcttgtgcatttacacggaatttgaagaaattaatgacatctgacatgtattaggtaaacaggcataccttggaggtactatgggtttggttccagaccattgcaataaagtgagtcaagaactttttggtttctcagtgcatataaaagttacgtttactaaagtatgcaatagcattatgtctagaagaatatatataccttaaaaatactttgttgctaaaaaatgctaacagtcacctgagccttcagtgaattgtaatgtttttgctggagaaggttttgcttgtgtggaagctgatggctgctgtgactatcagggtggtggttgctaagagttggggtggctatggcaatttcttttttttttttgagatggagttttgctcttgttgctcaggctagagtgcaatggcacgatctcggctcactgcaacctctgcctcctgggttcaagccattctctggcctcagcctccggagtagctgggattacaggcatgcaccaccacgcccgaataattttgtgtttttagtagagatggggtttctccatgttggtcaggctgctctcgaactcccgacctcaggtgatccgcctgcctcagccttccaaagtgctgggattacaggcatgagccactgcgcctggacttacaatttcttaaaataagacaacagtgaggtttaccacatcaattgaccctttctttcatgagtgatttctctgtggcatgcaatgctgtttgatagcattttactcacagtagaacttgttttaaaattggagtcaattgtcttcagccctcccactgctttatcaggtaagtttacgaaatattctaaatcatttgttatgactcaagggacattaaaaaaaaaagaaaaacaatcttttattgtcatttcaaccaggttcacagtgtcttttttttttaaattatattttaagttctagggtacatgtgcacaacatgcaggtttgatacaaaggtatacatgtgccatgctggtttgctacacccatcaactcatcatttacattaggtatttctcctaatactatccctcccccagcccccaccgcccgacaggccccggtttgtgatgttccctgccctgtgtccaagtgatctcattgttcaattcccacctttgagtgagaagatgcggtgtttggttttctgtccttgtgatagtttgctgagaatgatggtttccagcctcatccatgtccctgcaaaggacatgaattcatccttttttatggcagcatagtattccatggagtatatgcactacattttcttaatccagtctatcattgatggacatctggtatggttccaagtctttgctattgtgaatagtgctgcaataaacatacatgtgcatgtgtctttatagtagcaggatttataatcctttgggtatatacccagtaatgggattgctgggtcaaatggtaattctagttctagatccttgaggaatcgccacactgtcttccacaatggttgaactactttacactcccaccaacagtgtaaaagtgttcctatttctccacatcctctccagcatctgttgttccctgactttttaatgattgccattctaactggcgtgagatggtatctcattgtggttttgccttgcatttctctgatgaccagcatgttcacagtatctttatcagaagtagattccatctcaagaaacttctttctttgctcatccataagaagcaacttctcatttgttaaaagttttttcgtggattacaacaattcattcacattttcaggctccacttttaattctaattctattgctgttttcaccatatctgcagttacttcctccactaaactcttatacccttcaaggtcatccatgaggtttggaatcaacttttttggaactcctgttgatgttgatattttgacctcttcccgtgagtcatgaatgttctcaatggcatctatgatggtgatttttttctgaaggttttcaatttactttgcccagatgcatcagaggaatcactatctatggctgcttatattgccttacaaaatatatttcttttttttttttttttgagttgttgtcttgctcagttacccaggctggagtgcagtggcgtgatctcggctcactgcaagctccgcctcccaggttcatgccattctcctgtctcagccttccgagtaactgggactacaggtgcccgccaccaggtccggctaattttttttttgtatttttagtagagatggggtttcaccatgttagccgggatggtctcgatctcctgacctcgtgatccacacgcctcggctgggattacagacacaaaatatatttcttaataagacttgaaagtcaaacctattcctggatccatgggctgcagaatggatattgaattagtaggcatgaaaacaacatggatttttttgtacttctccatcagaactcttgtgtggccaggtgcattgttaatgagcagtaacattttgacaggaatctctttttctgagcagtaggtctcaacagtgggcttaaaatattcagtaaaccattctgtaaatagatctgctatcacccaggctttcttgttctattgtggagtgcaagcagggagatttagcatcattcttaagggccttgggtttttggaatggaacatcagcactgattggcctcaacttagagtcaccagctgcattagccactaacaagagaggcagcctgtcctttgaagctttgaagcctgccattgacttctccctagctaagaaagtgctagatgacatcttcttccagtaggaggctctttcatctacattgaaaatcagttgtttagtgtagccatcttcatcaatgatcttaactatatcttctggataacttgcttcagcttcttcatcagcacttgctccttcatcttgtacttttacgttatggagacaactttccttaaacctcatgaaccaacgtttggtagcttccaacttcagcttcctcccctctctcagccttgatagaattgaagagagttaaagccttgttctggattaggctttggcatagggaatgtttcattccagaccactaaaactttctgcatctcagggataaagttgtttcactttctcatcattcacatgttcatggaagtagcgcttttaacttccttcaataacttttcctttgcatttgcaattttgctaatttttttgttgcaaaaggcctaatttttagcctgtcttggctttccatgtgcctttctcactaagcttgtttctagcttttgatttaaaatgagagatgtgcgactattccttttacttgaacacttagaggccattgcagggttattaattggcctaatttcaatattgttgtgtctcaagtaatgggcttggtgaaagggagagacagagaggaatggttgtcagtggagcagtgagatcacacacacttttaagtagctaagtttgctgtcttatatgggtgtgattcatggtcccccaaaatagttacaatagtaacatcaaagatcactgatcacgtcaccaaaacagatattataataatgaggaagtttgagatattgtgagaattaccagaatgtggcacagagacaggaagtgagcacatgctgttggaaaaatggcactgatagatttgcttaatgcaaggttgccacaaagcttcaattggcaaaaaatgcaatacctgtgagtataatacaataaaatgaggtatgtcggaacctgattatgtcttagtcataaaacttacaaagaagtaggaggaatattttccatgccaacagaatgtatttaaatgatttgatatgtatttgaggttttctctaggagtagaacaacccaaccaggcaacctcccaggccctagcatattttatctggaatacatccattcaatcagaaaatgtaaataactgggaacattttcttccagtctctgcaaggtgatggaaattcataagaatgactgagagcattgtatgtagcagagtgccttgaaatcattaaagatgaaactatattcaatacaagttaatatatttatttcaccacctctcacccacgtcctgtcatggtactgggtgactgacaccctgacacccttcctcacagctcatgacctcttcacctctaccctacttccacttgcttttgtggccacatgaccttgtcatctcctggaacagcttattccatggtgaaaaaacagccctccccctctgactacagcctttcacttcctctcccctggaagtaccagtatttggactttttcaaggcctccagactgggggtggcttggctttctcttcttctgccacccccatcctgccttcctgtccattcttaactgctcagcccacaacatccatgacttcacctaggccttgtcagtatcctctgctccttctgtccacactgtttttctgacacacccacctggaaatcctgcatcctgcagcaagccagctgcccacctctccatatacattttggctgctgagggctgcaggaggaaatcccacagctatttagccctgaaccaccaagaatccatgatcttcactctcagctggactcttaacagtcctggaaagttcttttttatttttcaagctatgttttctatttctcaattttgtagaaaattgagagcaaatacctacacaggcagatatttgttcacagtgcccatctaatcatcacgtactcatctgtttacagtctgccatggctcctcattgccctgagaataaaatcaaaatccttttatttgacctgtgaggcgcaccatggcctgggattttgccttgctccccagattcttctgttactcctttctttatcacacatcatttgccaactattttgaactagattgaatttctggtaagcatgggctttctcatctttgggggtgtgctgttcctttatctgaaacactttcctggcccctagctcacacctcctctcaccatgcttcacctgattgtctctttttgccctcctgtgggtcttagcagagatatattttataccaaagagcatttccaactccctacgtcccacctcttctcctcaccagggaataagctaagtgccccttctttgccctcgctttcgccctgaactttccttgtgttagttctcttccactagtgcctggttattcgtctgtttctcacagtagactgctagctttgcgagggcaggggcagcatctgtgtttaatcatggttgtatgcctggtacctggttttgggtcttggcactctgtagatctttcataaaaattttttgagtgaattaatgaattcataaactattcattaaatgattactctgtgataactaatgacagtatcagttaacatatattgacattaccacacaccagggattcttctttttttttttttttttggagagtctccctctgtcacctaggttggagtgcagtggtgcaatctaactgcagcctctacctcccatgctcaagcaatcctcagcctcctgagtggctgggactataggcacatactaccacacctggctaatttttgtatagatggtgtttcgtcacattgcccaggctggccttgaattcctgggctcaagtaatcgcctgccttggcctcccaaagtgctggaattacaggctcagccctgggggggttattctaataacttgataggtactattatcattttttctcacaataaccctatgggataacatctcagaaactgacaaattcagaaatgtgtcagttcctgaaaaaggaaactttgggatggttggctgtacttttaaccactactctgtcttgtctctgcatgtgtgggcatgaactttgttaggttctgaggaggaggatggggggttgggaggagctgcatatgttctctgccccagaagaatcatggcccaggggaagaggtagcaaaaggaacaactattccagtatgacttgatcagtttcttgatggacatgtgtgcaaggcactatagaaggacagaagagatttttactttaattaattgaaaattagtaatttatatttggtatatacgtaatctaataattcattaagtggagcaacttttcaaactattctaacaaaatctaacattataaaactataacatggagactgcattgctaaatacctttcatctacaaaggaaagttatagggatttattatgttttctagatttctagctctctagtgctcaaaaaaattgaaaattgaaaaattgaagaaaaactgaaattgaagtgaccctcatctttgttgaagaaaaaggaatgtgacaaaatttatttctatgtgcagtcaaaaagtgtggtttgtgaaatgtgttgttgttgttgatcttacaggagaatcatgaaaaaagtctccatggagccatctgagcgcctggctagtctccaggcgctgtgggacagccagaccgtggctgagcagggcccctgtggtgagcatgcattttaaaactgaaatgtgaatagctggatggatatccccctgccaggaagttaagtctattcctagtgtgctactgtaaaggtgcaattagtttcaaggtgtaattagcagcgcacagactttagattggtggacaaaagtcctatatttaagctgtattgcatcctgctatgtacttactatagaacagggaggagaatctttgctgttttcccccctaaaaaggaaaaggataatcagcattgtcaacatcggccatatttaagctttaaaattttaatttaaacatcattttgccaaagacctgtcagtgtttttgttgtatgtttcaggtggattttctcagatgtatgcctgtgtttgtgactggcttggattttcatacagggaagaagtacaatgggtaagaatgtctgtgtacatgtgcatgagcacacacactcctggagaatattctaatgtttggctggcttgtttttctttttttcccttcatttatttttcacttaaaatcttcacttctcagattacataaaaacctgccattgtcattgtctaattctcactgtctctcttgctttcctggtcatctgcatggactgatgacatgactgaattatatttcaaataggatgtggatacaatttatcttacccaagacaccagggaattgaatttacaagattttagtcatcttgaccacaggtaagctgcttccttccttctttcctcctttcctccctcccttcctccctcccttcctccctcccctccctcccttcctccctcccttcctccctcccctcccctccccttccctccccttccctcccctccccttccctcccctcccttcccttcccttctcttttctcttttttcttttcttttcttttttcttttccttctcctctcctctcctctcctctcctctcctctcctctcctctcctctcctctcttctcttctcctctccccctcccctctcccctctcccctctcccctctcccctctcttctctttcctgcagttctctgttggcacttagggctgtacattatctccaaagaattgttttataagaggaatcagtacaatctaagaatctctagatttttgcctttcaagttatagtttcaaatatgtttatcactgtggatgacttgtggaggtccacagtgcatgtgtgtatccaaaatccagagttcgtagttagaaaatgtgctgaattttaccataaaaacagtataattcttaggttcttatgtcagcctacaaaagtctgtctattctaccctgtctataaaatgtagtattattttacctaattgccatttagaacattttttcaaggatgaactttaatactgaaattctgagatatgacttttagttcagagtttatgaattgggcattggtagggtgtatatgtgtatgttggtgaaaatcagtttgccagtatctgccatgtgatagtgataataaagtcatgaaacctgttacaagttatttgagaaacttttaggtttaagatcttgacttgaatatatttagggctatggcttgtgagattcagacctcagagaaaagcttcatttttccccatgtctcttagcacagcagacctggcaaatttattttgctctctaacagtcgagcccggccctattccagagtgtctggtaatttatcttggcctatcccaatctcttcaattctggatgtgctgctacttattagtagcaggggtagcaggggtcagccctacttaataaactccagccctacttaataaattagtagcaggtaggcaggggtcagccctacttaataaactccaacccaataaatcttttctctctgattggaattgggagagaaatctgggattccagctatatcatttgtgccatttggacaactgaagtgtcacagaggattgttgttgcccatatgtcatctcatcactagcatcttgcccccccctcccccccccagaatactgttttgaattatttttccacctacctggcaggaaatccagaattgcagtgtggtccctgaagagctctagccaactgaatcggccagggaaaaagtatactagctggatatacctcctctttgcacagcctgggactacggaagatggtgaagcaggctcagctgtgtctgtagttgtggctgatgggcctaaagcctccagttctcaggcaattttttttttttcctgcttagagcagttctccttcttcctataagtgaggcaactttatactttcaaatttagacaagatgtttcctgtgtagctcataaaaaagtgaactgagaaagaaaaagggaaaatattttactttgtaagtattttccaataaaacaagaaaattgcacgtggaataagatagaagtttacagtcctccagtgtttggtctcagcgtttttggtccctttacaatcttaaaaatgatcgatctttggtttttgtgggtcaaaacattggtatttacaatattataaattaaaactaaaatttgaaatatttattaattaaaaagtgacactaataaagcaaaccattacgtactaacataggtactgtttttatgaaaaagtaaatatattttccaaaacaaaaataaatcagcaagaagagtggcattggcttatctttttgcagatctttttaatgtttgacttaatagaagacaagtggatgctcatatctacttctgcattcacaaaattgtgatatgttgttttgactgaagtatgaaaagaaaatccagccttaaagatgtgtagttaggaagtattttcaatagccttttcacataattgtggctattcttccttggtacttcaccaaaactcaacaagtggtggtttcttaaagataagttgcaatgtagaatcagaaccatatcaatgaacttttttgtattttgttacattaaagtctgtttggtctatcttctcctttgactgggtcttatccatacataattttgtagcattgtacattggtaacttagaaaatattggttcattgagttatacatagctttcaagtatcttcctcttgtataatagcaaaagaaaaaagaaagacatttcataactatcatcactgatattataaaagttttttgaagtacttcagaggtgttgagctcatagtagcagacaaaagttttccaaaatttaaatttttgcttgaaagatacaattttactattggaaaaaaaaaaacaaacatattatcaggtgaagtgatatcttgaagtgaccagattacttcttagattttagagggaatgtctaccaaatcccaaatctaaataactatacgttgtcatttttttgtgatagtccactgaaaaaaaggagctggttctgcttaaaaatgcaactatcacacaaacactttacattgagacagtgatccctttgatatatagaggaacatacttcccattttgaacttacttctcattctgttacacaggatattaaaatgtttgtactcaagagctaaaatttaataaaatgagtaatgtttactgcttcactgaggacattctaaaatgaaattgatgtttgtttaaaaaactaggagcttgtgccagtgaagactcccgccttggcttgtgctcaggtgctagcagttttccccaccattgcttttgcaccttccatgcaaagggcaacacagtgaaaggataagtttgttttagagttgttatgaaaacgattttgaacctgtgaacctcctgaatgaatctcagggtccccaagggtaaatccttggagaacatctggcctacgggagtgaagacactgtagggcagcttgaggcgttttttttggacttactttattatgccataatgatttttatagcattgataggtatgtatagggtcagtgctaaacttttcagctaatccaccatgtttaatttggtctcatccaccaactaacccaccacgtttaattaacctgtcagcaaagggaaactatatttaaataagccactaaatacagttacctgaaatatgtagcaagagaaatttgtcaaaccttttagaaaaattatttactaattccttagttggagaattttcagttcatcagtaaagactgaattagtggggtagacccaaatcatctacttttcttgcttaattaaggggctggaaggacatttgtcattattgagactctagtggaggatttggaaaactttttttttgtcaaggaccagatagtaaatattttagactttatgagtcagacagttgctgttgcaattatacaattccactgtggtagcttgaaagcagacctagacaatgtatgaatgagtattgctatgttctgataaaactgtatttgcacagataggtgtcacgggctgtagtctgctgatacctgctctagatcagccacctctaatgtggaatgtatgtacctagagaaaaatccaagatgggctacaaaaaagtagtggaactttatattattgacttattttaatatttctccttgttttatgatatgtgtataaatattactatggtagtctttggaatgcaataactaaatattaaaaaatagatggtattcaaaacaattttttactgttttttttactagtcttactattaaaattagagccaggttatatatatgaagagactgttctcagtccttttagatgggctttgatagtattttgctaattgaattacaacaaattttattggctgattatttcgatgtagtagaagcttcaacatgctaattcatgaaagtatcagtctgcacttaaatggtacagttgtaggattcattgtggcataagttgatgtgatgtgtgtgggttattctcttacctctactggtattttcctcattgaggtgtgagttatggagaggaggaattagaaaatttggaggtgtcagaaaagacatcaaatgggctatgtgttgagctggagtttgttagcaaatatggggagtcattctcatatgtatacatgaattttcccactgtgatggttggttcctatgttccctatttgaacatatttgaacatatgtcccctatttgaacataattcagatacaagcaagcaaccttgtttgccatttatatttattaaaattagattctgcatgcatttgtatgtcgagatctgtgaacttcatattacagctagagaaagctgtacttgtttcagagtcaataagaaagctctcctgactggccatcatccaaagctttattttttcattccactttttctcgccgttatatttagtcttcatacttagaaacatccatttgtaacagtccttaaaaccatcagtgcttctggaatggaaattcagtgagggccaggctgtgtctgtcttgcttatgctctgtgatgtgatactctacagtcaaaccatagtcccagaataaaggatttttaagggatggtgagtgatctgctctggtggagcaaattagaatcctgcgagctaggattatttctagaaagcctgccagattacttaaatattgtctaccaccctgctccagttggcagttatagctttaatgacattcttaacccaattttgtttgaagccatggctaaattctatctggattcttacacggttccatttgtttcttttagtttactcatccaggtcattatttttttctgcctagaagtttgtaactgccattttcccaggaccatttcagattcaaagccggggattttagtcatgggagaggcactgatgttaatgtcacaggtctgagaggatgaaacatggccttggcagcttgctcatctgaagcacagagatggaggaagcaacattctgtctgtgtgggaacccatcaccacacgtgagacatggttttagaaggtccaggtatggtgacagggcagtgccttggtcattgttctgtcaccaagagcccctactactgtcctcacccctctgatttgcctaggatctgctcttcttcagacataggccccgtgttaggacactgtgccccttatatcatgtgatctgtagccacaggaactgaaggatggagaggcatgtgcatcgtcctgtcctggggctgctttatcagttatccagcctgctgttctcttttcattgtggacttggcttcctatttctatatatcttgctactgcactaaaacccgtaagatctatataggtgcttcatggtaatttgtaagcaatttgaatgttgtgataatgttttcttatttatttactatggttctatcagaactgaatctaggaccagtccctctgttgttgctgaataagcattcaggaataaggatgacagtgatcatgctagatctagccagttagtctctggagaacagtaattaggaagtacttggaaaaatgcccactccagttgttatttgtaaaatgtccagttggcattttatttaagtatattctttcaatttgttctgttttaggttatcagtaggccaaaaaaaggcatagattgaaaatttgttgtaaatttctcatgggatttctcgaaggtctgtgagctgacatgttaaaaaatttaattacactgtaatttggagtggtagggaattatgaaggtagaggtacttactggtgccaagaagaagaaaatatatagctttaactacatcgatttctcgtgttcctgacagatttttaagaggagctaatcccatcaattctttgaagactcaatgacatgcatcattgagcttcaacttggctcacaagagtccaggcaacagattcatgcttttttgtgttgtcatatttcttactgatcagggtgacattcttgagtgtgatactatcaggaaagagttctgagtgtggattatgtttgccaaggttgtcctaaggacactgctgtcattttttcctaatcaaagctccattttttttttttttttaattcctggtctcatttataaaagcattgctgtttggagagtggaatcagatgtgaacagcattggcttctgttttcattcctgaatttctcgaaatagttctgtagaagaatggtcctcaacctgggtgacatgaactctgtggggtgaacaagatgatgatatgttggggatgtgacgttaatagtagaacttgatttttgtctatttttttctcattcattttatttatgcatgtgtgtatgttttgtgctgagcttaatatgttagtgctgtagtacatgtatatgatttatagattaacacattttttagaggggaggatatgcaaaattctttgctgttggggatgaatgatcaaaaaatatagagaccactcatttaggcctctaggaatgtcctcatctgggaactgttttaggtatttacatccttcccagagttggtgagtggttccgctaataatttaataatatacaagacatgtctctatataagttaggatagcaggagggaatagctaatttgtgacattcttaactttttaaagcactccaactcccatattcaaagtagatggaatggagaaaagtctcaattattcccagaaaggctatcgaatgaatatgtcaggaaatgataatgctaggctctgagttttaccagccgttccacgagagtgcataatccattgtgtgcatgcatggagcatgaagagtggcagggctgtgcattcttgcattaaaacacctcctttgagcctttaaatgtttataagatttgtgagagggaaatcttcactcctgtggtaggtggatatactaagaataatcatgatgttgttcattgaattactgctctctctatttgtgcttttctcacattgcaggttgtagggcttgctagatgtccttcacatccatgaattatttttgttctttaacactttcctggtatacttaacactgtctatttaaaagtcacagtgttcttaaaatttcagagagatggcaggcaggggaaagggagtaaggagggaaattagtactgataataataactaggaaaattaaattcttatagtcatacagatcagaaagatggtatcagaactaggtaatctaggtttaataggttatctagaatgtagagtagcgaagaatttggcaagagatctagactctcaatcccttgtcaacttctttgtttttgcattttaactttgtattataaaatagcccccacatattagcagtttatttttgatgttcagaaaaaaagagggctgtacaattgtgacttcagaatacatcttaatgctccactaaaaatacaaaaaattagctgggcgtggtggcacgtcgcctgtagccccagctccttgggagcctgaggcaggagaattgcttgaatcgggtggcgaggttgcagtgagctgagatccaccactgcactccagcctgggtgacagagcgagactctgtctcaaaaaaaaaaaaaaaaaaaaaaagctttaaaatcagaagccaaatgattggttaattgtgatggaagggattttcagtcctttgatctgaaaacctgtggatataccatcctggtatatcctctgtagagtatacctctgtagagtatgaagattcttttgatggtatggaaggcaagttagtcattggtgagatgacagcacagtggttaagacacgggatcatgagtcacactggctgggtttgaaccctggctctgcctcagctagccttgtaaccttgcatatttcaaacttccctgtgcctttggaatgttcatctgaaaatggggttaataattatacctctcttctggggtaattatgaagactgtatggataaatatatttaaagcgctttgtgttagtacataaaaatgttataaatgcttgctattttcatatgcttaaaggtcttccttttttttaaatgaacaattatctaacatgacaagttttcttaattgaaaagaaaaataaagttagaaaatccttatgttacagaaaattttggatttcctgagactagttcatggatttttttctgtgatgctcttattttatcagttttatgatggctttttcttctggaaagatataagagaaaaacttgattctttagagttttaagggaaggtttcgattattctgaagtgtcaactgacatagaaataaggatcccaactttttctttctttctttctttctttctttctttctttctttctttctttctttctttcttttttttttttttaagacagggtcttgctgtattacccagccttgacctcctgggcttagttgatcctcccacttcattctcagtagctgggactacaggcatgtaccaccatgcctggctgatttttatatttttaatgttttacattttatttatgatttatttgtaaagatgggatttcaccatgttgcccagctggtcatgaactcctgggcaaaagctatccacctgcctcagcttcccaaggtgctgggattacaggtgtgagtcaccatacctgacctggatcccaacattttttatactccccaaccagtgattagactaataacaaaaccaaaaaaactctatgtgtagtaaatttacatcaggaaaaaggttagtgaatattaactgtctcatatctcttcagtgttgtgtaagaaatgattgtgccacgtggctctaaaagatgttaatactggatccttctcctcaaggtttgtagtcttaagatgtttttgctaccattttaaggaaatggtagaagtaatgtttggaaatgtacaggagaatgcaatgttgccatgttgccaggactcatgagagggttccctcaactgttacaactccttttaaggctgactttacttttcagatcaaaggttacatcataattaggagtttcttaggatgtcaaagcaaaacacagtgggggatgtacaataaatgtcatggactggtgatggtaaaaagctgttaccacttccaactaagagaaatcagttaatatgacaatggctgatgtttggaaacctttccccttatgtcaattaattgcatgagcacttagtgaaaacacgaggaaggatctgtcctgccataaactccaccagggaaaatcaggtagtcctttgcagtgagttggtatcagcacagcagtagggaggcccatgcaaatgtcaaattaaatatttattcatgatctgcttatgtgctcacttattactgtgtcctaagaaagccatccaggaaaatgaactctcagaaatgagattagttacatactgtcttgtgtattttgtattttctgttaaaatgagacctcatcagagtcttgattattactggttccataatttttttattatatgcaaacttgtttgtcccatgcaggcctgagtctccctgatccttggtcttcatgtttgttctggctgtcatggtggcttgatgcccagaaagtaatgaattctaggggtcctgaatgtcactctacactagaccttgcttcttacataaagcgtttgctgaagtacttcctaggcacttggtcttacactgtaagctcctcattctcagcatattgcagccaggctgagaggtattaaggatctaagaaattgaggttttacatgttggtatgtgtagctataatttattaacttctgtttctatttcatattctaatgtatgaacattccataatttatccattctagtgaatgttggtcagacattttggttagtgtattgtctgttatctgtaatgctgctaaggccatccttgtacttgtctccttagagaaaagtatgcagatgtgtactaggatggaaatcattgtaaatttaaccacttatgtccaccatttaacacaagaaataggctactgcctctccttaaaagacttacatgtatcaattttcaatcaccgttccctccttctccgcttgccccacctggttataataatgatcccagtaatctttgtgttcctttatagttttatcacaaaagtatgcctattttgattggcattgcattacatctctaaatcaatttggaaaaaactactattttgcattggcccttgttctagcctctgaacccaccttctgccttagactccttccatatctctgatacatcatgtctacattgtagagactgttaccttgcctctgatacctcccactgatattgcagaaattaactttctgaaacatttctgttcgaaagttttctacgactaccttgcgtgcatgaagtcatgcctcctaagtgtagctttcaagcctcatttctaagtgctaagtgttctggttatctattgctatgtaacaaagcccctcaaacttaatggccacagcaagaacagtcaggagtcacaatgaagagttcctcattcacgtgtttggtgcttgatgctggctggctgctgcaaggcagcactgggttccatgggtgagctttccatgagagagagctgggtagaaactgtattaatattacctcttctaatctagccttgacagtcctgtagtttgaaggacatctgtgttgtttttagtttctggtaattatgaacatagctcttaaaaataaataattatctacatttttatgtgaacataaattttgatttttcttggggaatttcctagaaatgggattgctggatcagatgtcaagtatctgttaaacctaataagatgctgtcaaactgttttccccattgagtgtatcattttgcatcctcattggctccatttgagagttccagttgctctgggtccttattagcaattggtattgtcaggtttttttaaatttattttttctcttttttaaaccgtgcatctctttttggtttttccctaatgcatttttctaatgctactaattgtgagcatcctttcatgtgcttatttgctatacatatatcttatttagtgaagtgtctgtttagatcttttgctcatttaaaaaaatggggtgattgttttttatttttgatagttctttatgcattttggatacaattcctttttcagaaatgggatttgtaaatattttctgtcagcatgtggcttatctttttcttctcttgacatcttttgtagagcaaaagtttttaattttgaataaagtccagtttatcgatttttttatttttgtattttgcttttcgaagatctaaaaactcttagactaagccataccttactctgttgcctgtttcttctgcttataatatgtgtctcatcccactccctcatctctgagggctcagtaacatcctctttctcaacttggttgtcttgattagcaccccttttatatgcacacatagtattttgtattccccctacctcactagggcttgtttcactgtgttatagctgcttttccttcctgagtctcctgctaggctgtgccaggccatcagggcagggaccattttctatgttcatttttgcatcaggcccagtgattcatgcatgatggcggcatttgttgaacataagaatgaatggaattgctggatatgctcaggttccccatgctgttgtacgtgctattcctaatttcttaaaatactctttctccctggctggttggtttccttctgatcttttaagccggtgagccattccccatttacttcaggccgaattacttgctgtcctgctgtgctcttagggctttttgtttgtttgttttttaacattttccctattcagcaagtctctcgtctttcgttgtattacagatagttgagaaggggtttttctttaccagtgaagtgcgatagaggaataagagctacacttctttttcatctcttagctctcagagcctaataaccctgcctagtactaaggactaaataaatatctgctgaatatgatatgtcattgtctccttctaattgtttttttaacataagaagcctaggcattaacacaatttagagaaacatggtaggcaaaccatgccaatatgcttagtctccatcctcctcatgaataactttttctagagcaaaagtttgtttatatcatccatggaagatttaatcttgtaaaacagattatgaatatgaatcatagaacaatttaaaaacataataattttgttagaagacattaatatcaccttgaatgctaacaaggtatccttatgacatttggctatatttctttctttttttaagaaaagtctatatttgttagcatttatatctttttttatatgtagattttattaatcccaattatatattatatcacacagatgttcactttagaatgctgtataccttaaaaatttaatattgaaccataagcatttttggtgttgagtattgtggtatgtagagatgatgctgttttactcactgcattcatgattccgtagagtgatgtgccttcagttcctgaaaatgacttcatctatgacaaaagccagttatacttcaaatcagatcatgggacagaacagaatacacaaaaagtggttctgaagtgtggtcactccttgacattaaatccacaaaaaagatgagactgctttgccatcattctgaatgttgaaatatacaagagaacgctcagcgtgggctttggggactctgtaataagatggaattcacccttagagaagctacaacctgtaattaggcaataggaagagatacaggaacttgttctgagcacagagcatgtggtcaatggagggggacgaagagagggaagaccataaaataactattgaaagagttgttctcctttttttttttttttttttttgagacggagtctcgctctgtcgcccaggctggagtgcagtggcctgatctcggctcactgcaagctctgcctcccgggttcacgccattctcctgcctcagcctcccgagtagctgggactacaggcgcccgccactacgcccggctaattttttgtatttttagtagagacggggtttcaccgttttagccaggatggtctcgatctcctgacctcgtgatccgcccgtctcggcctcccaaaatgctgggattacaggcgtgagccactgcgcccggccagttgttctcctttttaatctaaaacttaaaaaaaattttaaacttaggcaaagttagtaaagaggcttgtcagtagaaaacctggcatgtggaaacacatgactgagcctgcctatttctctggattttttttttctactatctgtgggcactcatctcatctttttaaagcatgtctattgaaactgcacacatgtggtgcttcagagccagggttctgactgtagttctgtccctttggcctagtttcagtttattttctgaacatctattccttcatctgtaagatgtaaacaacagtgactcctggggttgttttgagatttaaatgaactggtatatgtagagtgccaagcacagggccgggccacccagagctatgagataatattgattctcagacttctttccaccttctgcctttctcttctatttcagtaaaaatctgagtatctgctacttgtcctgcactgagcataaaactgatatgacctcactaaagctaaaaaactgaagtagacaaaggcttggttttcaaagaattgaataattgggggtggtaggggactgatgcttaaagcaacaaactataatataagatagaataaataaatgctaaaaagggaggtggggtttgaccaggagaggacttaaggaggtgaggatgtgtaatagtggcatttaaggacacatagtttttcataactgaacagagcagtaaaagattattctgaatgtgaaattgcacatcatgttagatgagtaacaagttgtcagctttttgtcttgagcatgggatgagttgtgggagcttaggctgcaaaattggaatggaggcagaactgtcatgcagatagcttcactacatggtcaaagagctgatatgaagcctaagacaaaaatgcacctgggctatcttatggatgcagtcactgctaagaactaaagcaaaaaaaaaaaaaaaaaaaaagaccaaatggttgcaaaatgcttgctaagcattgggaatccatccagtgccacttactgtcagggtaggcagtaccttgcttgcaatatgaactcctctgactagagaatactatatgagataattgatggttaaagagtttatgaaggaggccaggcactgtgtcttatgcctgtaatctcagcactttgggtgggggccaaggtggttgagtttctttgagcccaagagtttgagactagcctggggaacatggggaaaccccatccatacaaaaattagccaggcatggtggcgcgtgcctgtagtcccagctacttgggaggctgaggtgggagaatcacttgagtttcggaagtcaaggctgcagtcagccatgatcacgtcactgcactccaccttgggtgacaaagtgggaccctgtctcaaaaaaaaaaaaagattttatgaaggagagatctaaagaaataagacttgttattggtatggacttagaggtaggatttctctcagagcaaggaggtttttcaagcaaattctgataccaacctctttcctttggaagtaggaaacagagtccctagagacaatttacttcaacttttgggaactttgaagatcagtctttgagaacttagttgttgtctagtggccaactagatgttgtgtttctgaataatagaaattaacaggtgaacttggatgtcatggattaaaaattaagtgtcagtgtagctactgtaggagcactttcatgtactttgttgtttctgcttccagggacctaatacctatcattgctgctctggaatataatcagtggttcacaaaactgtcctctaaggatctaaaactggtaagtaatcaaacatgcagcaaatgttgcttggctttgctgaatttcaaaaacccaataattgtgggaaaaaaacaatttttttactgtactagtaagctgtatacattttatttcttgaggaggtattttcctttaaatgatttgcgtaacatttagtcaaatttgtaatgtgagatgcttccaagtatttcctcatgtattcagctgtttcgggcaatttaagaagatgaacaaaaagatacatttagtgtagcctttagtataaagtcattcagttggcaaaaactgttaaagttacatttgcacagctgcaaatagcagattttatattcctatcttacactctgtctctacaaagtttcccttcctaggaatttaggaaaacattaacaggtagagttcccctggtcgagtaatgatagttaatgttgattttctagatggggttttgggtagatttatatgaaagcaaaatgaaattaaagtgaaatctgttttcataagatatgaaggagaaaaatatttggtatattttattagtggaaataagatgctgtgttggggttgctgccagttcatatcagtcatatggacagatgcttatacataaattaactctctggtgtttgttatgggataagaaagaatttatatgttttcctggagactctcacgtttaagcctctaactttcagaggtcatagaatctaggggtttaagattttcatagtgaatacatcagacttggaatgagacgtggatctgtaggacatggagggttgagactggctagtgggcaggcgacttggttctctgaatttgcctggggtaggggtggcctaaaacattataagtatgaaaatggactaaactcatttggggtcccttaagagccaatatggtagaggaaaatgcatgaacttggaataagaaacctggatttcagattttaatttttattacaaggctgtggtaccttagataacttacctgaccttccagggcctcagcttcctgcacacctgttattgtgagctagttggaaccatttcttattcatctctacccagtgcttatgagaatgtgtggctcatagtaactatttaataaaaattggtttaataagtagatgtctaataagttatcaaagagattgagaaatgaacaaatatgagagtatgaattatgtgaactatataattcaaacaagagttgtgtctgagaagtgatgatggagtgagagttggcatgagttggatccaggtgagctctcagggagcagacaggtagccattatgggagacctaagaatagaagtcccttgtttgctgcttgctgggatgggaccatttccaggactgagccagcaaagagtacaggtgggaaagaggagccactggaggaatgagaaggagattagtccagggattgtgggaacagagagaacaatggtttgctaccatgtcagtttttctggctcattcaaacatttacataagcttgtgaatttcaaaatggggcctcaagagggtttcaagaaggttgtggatatctcacttttggagagtgtcccaacctgcaattacaggaaggtgtccaggcaattgctgctgccattctgtcattattcctcccaggtatcatctcctttcagctgccttagatgtttaggacataaaatatgtacctaatcatttcagtcctggcaaaacaaaccatgtaagtgctagtatgctttcttgggtgtcctgggatggaaggaagtggagtgacaggatgtgagggctgcttatgccacttttctgttaactgagatttaaacacaaaaatacagtttgcatatatttttaatatttggtattttaaaatgaagtgatctttgtggatattactctacaggtcttcaaaaagaatactaaattcttgatgttttttacccaaagttaaaaagaaatgatacttccccttttgattggtactgaagtgggcagtctcagagcactgtctaacattgggtttattcaaagaaaaggacaatgtgaagaagcacatctttggattttgtaaacatgaagtgcaagggcaaaaataagtggctgcttctcaagttatatgagctctctgggttaagattgttcctagtccaataaaagcctcctgtgctaaggtgccacaggaaaaatatgactttatgttgatcttatgaagcaaattagcaatcactatttctaatttgagtcaaggatttttaaaaaaaaaaatggtaccgaatatgcaattaggaccatgtttttggccaacattcttgattcattaaaaaaaacagcagaattggggtcttgctcagcttcttctgttttgcaattcaggcaaattggtgagcatctttttttagtctttagggaatgacatgctggcaccagataatgtatacggtttctttcagttctaaagttccattttttaaaaattattttactttgcaatagttcatttattactctatagtgattctagtttttgttgtttacattccatttttaactgagtgcaagctcctggagagccactgtatccagtttttaaaaaatttcctaaactgatgcacgtagtgctgcacatgctgtagacatttggataacactgttggaattatcacattatacttagtagctaggtttgagtgtgtctccctttaaaagtttcatttccttatattcatccctgtagaaaatgatgcttttaatgtacttggcactcaataaaaattagtagaattaatttaatcatgaatgatttgttacacgtctcccctactggcattttaaagaaaagttggagacactttcatacattttccttaataaatttgtattacagtatttataccccaatgagctataaatcttcaaagcattatggtaaattacttttccgggtgcactgcaaggtagcccagaaatggtaatgatcccaagaattatttctggttattaggataatcgctgcaaaaacattatctaagtaatcactttttatcatgacaacacagaataagaccaattcctttgtatgtacattgtgagataaagaattatactgataagggtgtcaccattttgaatatcatcactgtcagcataatgtaaattgtaggcatcaggtcaattggaattaatttttctctttcctcctaaatcagtgggacacattagaaacccagcaatagtgtaaaagtggcattatagacagaatggaatcaaacagcaaataagaattatgagagccttacatgctgtggtacttggggtgtatccaagttaggttttcttaaaaatacttggctagagaacttgtgccacattcagactgtgttccaattatggttaatccagttgggtatttgtgatctgataagtcaaagtactgtaatatttttatgtgctattttaagaaaagaaagtgctttgatattatatgctgtggcacatagaacatgccttctttctctcactcttttttctaaatatcatgaagtatttaatacagcctaggttgcaaggagaattttaaaatcactttgtgtgtgtgtgtgtgtatgtgtatgtgtgtgtttgcatgtgtgaaacggggtctcactctgtggcccaggctgggatgcagtggtgcgatgacggttcaatgcagcctcgacatcctgggctcaagtgatcctcccaccttaccctcctgagtagctgggactgcaggcgtgcgcagtctgggaccccaccccactactttttgtatattttgtagacatggaatttcaccatgttcccaaggctggtcttgaactcttgagctcaagtaatctgccttcctcagtttcccaaagttctgggattacaggcacaagccaaaatgactttttaatgtataagtaatattaaggtcaagaaccactttaaattagttttggaatgaagcaggttataaatataaaaacattaataaagaaaaaaatgcccaattctaccaccagggcacaactcttcatttttcactgtcccctgaaaattttgttataagttactcattttaattgttgtaatcttgtttaacatatatgcataatagttatataactacataatggtttttttgacattttttattacatgagacatgtttattaacatgagacaattatttattaagctttttcctattattaggttgtttcccactttatcctatttatgctccagtaggaacatcctaataccagttagtgttcatcaagtacttatttagccttcctattaagtttatgacatctttaaaccttaattttcttatctatgaaaatggaataataatctttaatggttttataatgaaatacacatagagggcttaactcagtgcctggcacatggtgagaactctgcaaagatattttcaacatcattatcataatcactaacacttagtcttcagctctccattttgaatgtcactttctttgggaagtcctctaagtttcatgagcctggattaggtgcacctatatgtatgcatagcactaccaaaatggtctttttattattttatcataattgtatatttttatcatttcattcaggctgctataacaaagtgccatagattgggtagcttataaataacaggtttattttccagttcttgaggcagagaagtccaagatcaaggctccagcagacttggtgtctggtgagggcacagtttcttgttcacaggtggtgccttttagctgtgtctttactaagtggaaggggcaagatagctctctggggcctcttttacgaaagcactaattccttcatgagggccccaccatcatgacctagtcagttcccaaaggcacctaattgctaatgctatcacagtggggaaattaggtttttaactgtgaattttgggaggtcgggggacacaaactctgaccatagcattcttcttgtctgtttcccctgctggatggcacactcttgaaggccgggactttctcctttatatcattgtatttccaggatcttcatcacgatggtgcgtagtagtagatgctcattcaaggtttattgaatgagtgaatgttttacttaattaaaactttgcattgcatagatttataacaataaagtttttcttctttagagttatggaatagtcaaagaatgttttctgttacagtccactgatgtctgtgaacagatcttgagggtggtgagtaggtccaatcgactggaagaattggtgttggaaaatgctggacttagaacgtgagtattttcctgaatatataaatatgttgctttaaaactctgtgccatttgctcttctaattaattcatagttttttttttttttaattgggctgatcacatatacagcaatgtttttccttctgggaaaaaaatatccctataattgccatcatcatgaaggctaagaatttggtaacatctcttgataacggtgtcacttgatatttttgagagtacatagtatagtttttaagagcatggatccttgagccagatgtctcctggccttgcacaagttgtttacgctttctgtgcctcattctcttcactcttaaaatggggataataataatgcctattttatagaattaaaattgctagggtaaatgaattaatatatttaaagtacttggcaaagtgccttttactctgtagatggtatatgtaggtttaattattatcgttactggtggtcatagtgataacatatttcatatgactttactgctttgctttgatcagttttagtcattttttctcccttttcaggttaacacttgcatagtctttatctagtggtttagtagtcactacctaagcctactgttaagagcataagagttagaacctagtagaataaagattttactgctaagtgaggagggttgacagtttcataatcatagcacttagtacattatttgaagttaaacataactaaaacagtggttttaatttttgccaaaatgtagcactagcaattgtaacctttaaacttaataattagtgtaatcagttttgcattcacaattgcatggaatgagaaataagatgtggtgaatactataattttcatgaaaagcaggttcaatccaggattttttttttttttaaattatggaggggccagaaagtactgttaatagcacacaacagagtgcctttaaaggggcaattgtatattttctttttgcttttggccaatcagaatgaaccgttttctggctgtggctttacaaattctctaatgaggtgttaatgggtattaagaaatatatgctatatagactaatattgtaagggaggtttctctatttagatttcactctgttctaagctttaaatgttccgttcgaatggttttacattttgttatttaatcttattgttttgtttacacgcagagattttgcacaaaaactggccagtgctctagcacataatcccaactcaggactccacacaattaaccttgctggcaacccactggaggatagaggtactgcagagttctcattatcattgatgccagaattgtaagaggattagagaattttaatttagccatgcctgaagagctgtatcaagctaagttgtaattataagtgctgttaatggtcctgttggcttccagttctttccaccctttcatataaatgcttatgttacaattgtatgatctgcttcaccttttttgaagtgaaacaaaaggaaaggaagatattatttttaatatgttttattagttacatagtcctgcataacaaattaccacatacttggcagcttaaaatgatacaaatttattatctcatactgtccttggctcaggagtctgggtacgggttagctgggttctgtgctctgggtctgtctctcaagacaaggcaagttgtcagcaagggttgtgctctcatctgtaacctggagtcctccttaagttcactggttattggtggaattaatttccttggagctataagctcgatgtccccagtttcttactagctgtcagtgggcaccactcccacctcctagaggctgtgctcctagaatggttcttgccatgtgacccccctatctcacaacacagaagtttgctttgtgtgtgaggccagctggagtacatctctctgatgctttagtttcttttaaacagttcacctgactgcatcaggcccacccgtgacaatttccctgtttttcatgaactcaaagtcaagtgattagtaacctaatcatggtagggatgtctcattactgttgacccttgaacgacacaagagttaggggcactgaccccaagcaaccaaaaattcacatgtaacttttgactccctcaaaacttaactactaatagcagggttgactggaagccttgccaataaaaagttgactaacatgtattttgtatgttatatgtattatatattgtattctttaagctaaataaaattttattaagaaaatcataagaataagaaaatatatttcctgttcattaagtggaagtagatcatcataaaggtctttatcttggtcatcttcacattgactaggctgaggagaaggaggaagaaaagaaggccttaatcttgctgtgtcagcagtggcagaggtggagaaaaatccacacggaagtggaccagtgcagttcaaacccatgttgttcaagagtcaacagtatatttactgctccccacccccatattcaaggaaattgcacagggcgtatacacccgggggtgagaatcttggggactatcttagaattctatttaccactattatcttttaatatttaacaagatttgagtgtgagaatagggaaaggatgaaggactgtagttcacgaagagtcagaacattttattaaaagtgtttgcatgggtagagagaggagtcagtaggtttagaaagggaaacttgagaatttgaattcttagtagaacactgatggacaaggtttaagaaggaattggtttatctctagtgggactattttgttttcattttctgttgcaaatgttttccaggtttgttgaataaggcctttcacctttcaatgttatatttgatgagtattaatttttttttttttttgagaaggagtcttgctttgtcccccaggctggagtgcagtggcgcgatcttggctcaccgcaagctctgcctcccaggttcatgccattctcctgcctcagcctcccgagtagctgggactacaggtgcccaccaccatgcccagctaattttttgtatttttttttttttagtagagatggggtttcaccgtgttagccaggttggtctcgaactcctgacctcgtgatccacccacctcggcctcccaaagtgctgggattacaggcgtgagccaccgcacccagctgagtattaattattaaactgagctgaatatatgatatagatgttcagtttttctttttgtccttaatatggttattgttctgtgctgacaaagatacctaggttgtattcaagcaaaaatctccagcgtaacttgtcatcatctaaagtagtgaatctacaggaaggttgagactgaattagaaaactagatcacgcaaaaagtaccctcatagaataagccaaagctgaaattaatggacgcatagtaatggaataggagtttctctagggtatactcaattcttaggaaaaacaaatgtttctctattagatactacagagaggtgaatgtgacaaagtagaaatcatggtgatcactgtttataggagggctatttttggttttgtttttaaaatgggaaggattcagtcatatttatcgacagacaagaaaaaatctctagagggaggtagttgtttgaggaaggttcttaagcaaatgaaatctagagttaagatggaccaggaaggggacacttctcagtgtttagagaaatgcaaatcaaagccacagtgaggtaccatttcaaaagcagtagtgtggcaataatcaaaataagtcttagaaaggatgtgaagaaatggaaactcctacattgctggtgggagtgtaaaatggtacagccacatgcaaaacatgttagatagtttcttaaaaagttaaacttggctgggcgtggtggctcacgcctgtaatcccagcactttgggaggccgaggtgggtggatcacgaagtcaggagatcgagaccatcctggctaacactgtgaaaccctgtctctactaaaatacaaagtattagctgggcgtggtggcaggcacctgtagtcccagctactcgggaggctgaggcaggagaatggtgactggggaggcagagcttgcagtgagccaagatcgagccactgcattctagcctgggtgagagagtgagactccgtctcaaaaaaaaaaaaaaaagttaaactcaaatctgccatataacccagaaattccactcctagttttatcaccaaagagaaaggagacttaggtccacacagagacttgtgaatgaatgtttgtagcagtattagttataatagtcaaaaagtagaaacaatccaaatgttcatcactggagagtggttacataaaatgcggtatatataatatgtgcactggaatactactcaaaagagaatggaattctgacacatgccacatcatggatgaacctcaaaaacactgttgagtgaaagaagctagacttaaaacaccacacattgtttggggagatggaagaggaagaatgaatttgaggccctttgttttctctcccgttgtccgcttcatgttctctgaggtgcagccacattagacaacttgtcaccacaggtgcagtttcttctgtcttgccctcactttggagctcctgtgcaaacttccataatagcacttacttcattctgcccacatgagaactagaggtggacatttcttccctcatgcttcagcaccttgcttcctctcatccccaccttctgggttttctgtctccccttccttctttcctaagatgcaaagtgtctagtgtaagacttcgtccacaatcaacaaatattttctttaaatcgaatttgattgatttgattttattcaatcttaatgctcttgtatagtttttttatttgcacttgaaaattacggtgaagtttgagagatttgttttggatagagtcagaccatgtgttcaaagatgatgtttgcctactttttccctctgctttcctactcctgagacctgactttgtgtccttttatctagctgcgtcccattcaccagtgctgtcatcatgaatcattccaaggatagccttgaatgctcctgccaagtctgttgtgtggtttctgctcacataccctcaaattttgacatcctggaaatattttcgcagaccaagacttttctcatttctgcctcttctaaattcattcattgctgtatttgccagtgctcacaggcaactgccaacattcatatctcccacctttctttactcttggggatgagcctcctgaacacaaattctttattcttttcattcaggctaaatacctgaagatgattggtagcttttctgctcatggatggaaattccacaagaaatctaattgagtgtaaaatatttattgaaatttcaatctagagaaaacttttagtaatttttgttcccaagcttttcagtgatggtattttgtgtttaaaactaataaaaagggtgaatgagaggtctataattaagttatacaggatataaaaaacactaagccaggactattatttgtaaggaagctcaaagaaatacaagggcctgggcgcggtggctcacgactgtaatcccagcactttgggaggctgaggctagcggatcatgaggtcaggagattgagaccatcctggtcaatgtggtgaaaccccatctctactaaaaatacaaacattagctgggtgtggtggtgtgtgcctgtaatcccagctactcgagaggctgaggcaggagaatcgcttgaatcagggagtcagaggttgcagtgagccgagattgtgtcactgcactccagcctggcgactgagagaaattccgtctcaaaaaaaaaaaaaaacaaaaaacaaacaacaacaaaaaaaaaacaagggagataaggtcttaacagttaagtggccaggaattctgaggaatttaaacagcaaatggaatgtggttttgtacctaaaccttccactcagggacttatttggaaactctcaaagagttgtatgatatgaatgttgatgcagcaaatctctgttattttcacatctatgtacagaggaccaggcctgcagtcttctgattgctgagggggttgtggtaaaggaggttcgagtatgacttagtaagcagaggtataatgtgtatgagtaatccttcaaatgctagataccctcctgctctctttctgcaagagcaacacaagatggtgaacagaccacacacatacacaagctattcttatccttgttgccaggccatgcctgttcaccagcttgctcttggtcttcatctaacacagtgtttttttggactgtgggtgaagacccattagctggctgtgaaatcaatttaatagttcatgacaagcaattttttttttttaaagcagtggaatagaacagaaaatgtcagagtacattgttcaggggaaactttagttttagttttctaatactaatatatgtgtgtacatttatgctttacttctctaagcattgcaaattctgtgttctgtttttcctagttatctgtcccaattaccttagtttttatgatttcagccttttcagaaatgtctgtcctcacttcttctcatcactttttttttttttttttttttgagacaaggtctcactctgttgcccaggctggagtatggtggtgtaataatggctcactgcaacctccatttcctgggctcaagccatcctccccactcagtctcccaagtagctgggattgcaggtgtgcactaccacacctggctaatttttaaatttttttttgtagtgatgtggtctcactctgttgcccaggcttctccactcactctattcaaaattcgattatttcatttagacaccatttagaatcctagctctagtgttttttgttgacctgaagtacgctcatattttttcccagctatttggtggtggctctgatttgatcttctaaataagacaagagacttatagattctaggattgctgcttacttttcttggtgttttaggtctttcatgtctcagtgtatatcagtgagtcccagagtcgaaacacatgggtttaattcctggcttcacagctttctagctaagtgttcttggacaagttacctaccttctctgtacctcagcttccttatattaaaaatacaatgatagtacctaccaaataagaatgttctaaggattaaatgaaataattgatatttttatggttaaacaggtaaagcaatattttaaaaatggcatagattggctgggcacggtggctcacgcctataatcctagcactttgggaggccgaggcgggcagatcacaaggtcaggagatcaagaccatcctggctaacacagtgaaaccccgtctttactaaaaatacaaaaaattagccgagcgtggtggcacgtgcctgtagtctcagctactcgggaggctgaggcaggagattcccttgaacctgggaggaggaggttgcagtgagccgagatcgcgcctctgcactccagcctgggtgacagagtgggactccatcttggggaaaaaaaaaaagggcatagatttagatttagggcgtttaaaagttggaagtattgactcaattttttccagtatgcctatattcttatactcttggttctaagtcttttcctctcagccttatttttgaaatggaaatacttcattgtattttgctttttcacttactttccttagtgtttctgaactctccaggaaagttatagaattggtagaaatgtaaaaatttttactcacctgtgctctgacatccacaatgttccaatgtgtatgctttctaacagagaagaggccttttgtttctcccagaaaccactaccaagatcaagagacagaatgttcccaccgttctccagacttaccttgtggtttgccccagtgattaccagccctgtcctctaccacttggaaaagataactactattctgacttctctcatgatggatgagctttgcctgttctttgcctatgtactcctttgtgtgtggcttcttttgcttctctttgtggagagattttttaataatagatttgtttccttgaatagatagagaactattgagattatttacttcttcttaaattagttttggtctgtcatgtttttcataagggatttgttcctttctattaaaatgatagttttttgacttacagatgtgtttataccctcgagttataattcaacgcctgtaagatctttacattctcttttcatttgattttgataatttgatctctgtttctcatttatttattttaccagtcttgttggagtttattaattttgttagtatttttaaagaaccaactttgttaaatttacttatttttatggctgctatctatttaactggattcttccctttttcttattttttttccttccttctgtttacagaggtgggtgaggattaatttgctgttttttgagctggataattagataattattttccagttttttatctttcttaaaatatgtatttaggtctattgatttctctctaggcatggctctagttagatcccaaagattttaataccatagtttttagatttaactcaaaatatttttaaaattcccactgtgatttttgactcttttgttatttagaaatatattgcttaagttataattatttggggattttctaattatcttattgttataattcctattttaactgcagtagtggtaacagagaacatacaaatattctgtgtatgaattcacagtactaaggaacattctgttatttgttgagactttctttatggctcagtatatgattccttttggaaaatatttagtgtggactttgaagaaatgtattctgtagttactgggtacagcattttaaatatatcagttatatcttttttcattatgatcttgatattttctatatctttactgactttttctgttcatttattagctactaatagaagtgtgttagaaaacttccattattatatatgcgtgtgtgtttatgtaatatgtgtattttccttttgttactgtcagatttactttatatattttcagatgatgttaatcagagcatagatttagagtaattgtatcttcttaattaatgaaatattccatttatctttagtaatgtttcttaaaatttaaattgtcttattgcagctacatcagatttcttttagttagtgtttgtagcatatcttttttcgcttttacgttcacttctgaatacatgtatctctaggtgtatctcttgaaaacatttgatatttttattcaaataaatcatctttgacttgtaatttgagtctttatatttatataataatatttttaaataaaataaatttaaattatttatatttaatttaaatttatatttaatgtaatcattgaaatattgggtgaaaatctgtattactatttgtttcctttttttttttttttttttgagttggagtcttgctgtgttacccaggctggcgcgatctcggctcactgcaatctccacctcctgagttcacgccattctcctgcctcagcctccggagtagttggaactacccgcgcccgccaccacgcccggctaattttttgtatttttagtagaaacggggtttcaccgtgttagccaggatggtctcgatctcctgaccttgtgatccgccctcctcggcctcccaaagtgctggtccatttttttatttgtccccttttttcctctcttttttgccttttagattaatcaagttttaacagttattctgtcttcccccctttcccacatcaacttgttagtcacttattttttttttttacaagagtgtatcagctaaatatcaaggctgccctctttttgtaatttacaaaatggattagcatactcaagtctctagaaatactccgataaaaacctgtttaacatgatttaatccagtgattttcaaacttctttgactgtggaaacacagtggggaaatagaggctcccagaacacccactgttctaggggaaaagcccatgtagaggcttagtctagctgcatgacctccatgttgtttcttagaagttgtgataagatttgtagataatttggggttatataagggcagcaaccagcacagtaatttcttattgctgcctgaagcttgataattagtctaagggaacaggaattaacattgtttaaggagccttctcaagaacatgcccctggggaaatgatggctcatccatagcaggaggtcagttgaaggacctgtatgaagggcatacgtttgtgtattacttatttcctcccagaaaacagtctatgctcattgcagtccttggatgggtgagctggtgttcccaatctcccactctggttattaaatttagaagatatctgattttaaataccataaattcctggtgagttatccaaagttacaaaatctacttttaagaagttaaaacatgctccgaagctctgtatgaggttgttagctataagccaattaagtataggaatccatctgccattatcagaatagttaatattactccattcttcttggcaataattaaatatcatacatccgctcatctagaagagcgatcaactcattaagacaggttaaaaagaaaaggggttaacaattatcctttccaagaggatttgcattttaaatagaactgtgagaaaaagagtgacacgtggccccaagaaaagtatctccaatggaaaagtttcagatattgtatgcctaataagacaatcttccccttctcttaccctgtaggtaggacagaaagaaaaggggacttgatggtaaatgtttagaaaacaaagtctgatattagaaagaaaaatatgatcacttcagtcagaatcaaaattaagttaattttcatccattgtaaaaaatgcaattctgagaacttgaaaattctaatcgcttctttttcctttctcaggtgtgtcctctttaagtattcaatttgccaaactcccaaagggattaaagcacttaaatttatctaaaacctcattatcacctaaaggtacagtatttcttatttacctaagagtgtgtctgaaatatttctgctgcacctgctaccttagttagaattatttgttacatttaaaaatacattaaaaaaatacatttaaaatatatgtattatattactctggcagtttgaagataaagactttatgtaattcaatttttgatgctctgcagtgaagtgctgtcagagcagagagtaattttgacatgtacatgcagtctttaacttttaaaactttgagtcagggaacacttgcctgtctgcctctgccctcctgcctcacattccaagatgcacctggttgtgtttctcttggttcaacaagttggcctttctaactgtcagatagactgtctgctttacagaaaactgttgggcttaacttgtgaatcaccactgtagctccactccttgtagttctgtctttagagatttccttatcttctctccaggtcagttcctaacttcactcaccttcattttttccatcaaatcctgtcaattcattattattttgccacagcagcacctcaataataatattagaaattatcctgcattctttgtgcctttgtgtatcttcacattttgccctggatgcctgaaaatttttttttaatccccaaatagagaggttcagtttgttttataaaactgtttatctgtgataaactctgctgagatgtgttccctcttcccaaggccatacagaatcaatgagtgttccctttgtattacttcaagatcacatatgtaacattattgcataaatattgtgtctttcctgctacactggggctctccttgtggcctgtgcttctctctatttatctgcagcacctggcactgtgcctggactactgtttaacaaaagtttcttgaacatcttgccatttcttaagaaagccactgtcttttggaaacagtatgtatagtggttgaaagtgtcagttctgtagtcagattgccgaaggttgaattctgacttttctacttatgtatgaacatgcatttataatgtctttgctcccagatgcctcatttgtaagacagaaataacactatcttatttctacacaggtagagttaaatgatttaatatacatatagtatggtttctgtcacaaagtgcttagtaaactgctaccatcacccccaccagtaccggcaccaccaccaccaccatcatcataattatcatcatcctgagctgtcttatgtttttatatgcctcagtttctacctggagcaaccttagtgtccttacctggaatgtctcatgaattaccatgcatcctatgcagattcagcttctatctctgtctcaaaaaaaaaaaaaaaaaaaatggaggtagattaaaaaaaaaatccgaggtggattgaaaaaaagtcggaggtggatttttaaattttatttatttatttttttggagacagggtcttgctctgtcacctaggctggagtgcagtggtacgatcttggcttattgcagcctcaacctcctgggctcaagcgatcctcccgcctcagccccccaagtagctgggaccacaagcgtgcactaccacaccctgctaatttttttgtagagacagagtttccatgttccgtggccagtctcgaactcctgagctcaagcgatctgcctgcctcagcctcccaaagtgctgggattacatgcatgagctactgagcctggctgcttctatctcactttctctttgaaatgttctcagacaaccccctctcaccacaccctgtatgactagatgctcctttctctgtgttccttagccctgtgtaaattcctctatcttagcatgtgtccatcacatttgattgtgtcttagcctgtacatttctggacaataagggctttgcctcgttcattgctgtgtcctggcacttctcagtctctcacggaatgtgccttggataaatgagtgaagcaaagtcatcccttgatgattttatatccatgccatcatacactattctgaacatgcagttaaattaagaatggtttgaaattgagattagttccgtaagtcccatgattttatgtgcacacatttatacacacatatttaagattaaggcatgaaaataaattaccaaagggatttccccaggagtcagtgttttcagacctattgcctgaagccatctacagatcttacagctaagtttaactcctttacattatcactgttccacttcagcaaatccattttatataaacctttttctgataattatcaatgtagtacacatttatggtaaagatttagaagatgctaaaaagtataaataagaaggcaaaccccctccaaactcccttgttccttagtcctttgtatttcttttagggaaatcactaagtttacatcctttgttagttttctgtttatagtgttaatctatttttaaaaaagtttatatgacttgtgtacatattaaaagcattcattattgattgtgtgctccataggtctagtttaagtcgtttataagataaaggtggtttttaaaaacctgattatatgaattacatctgtaattctagccacccaggaggctgaggtgggaggatgcttgagctcaggagtttcaggttgcagtgagctatgacagggccactgcactccagcctgggtgacagagtgagaacctgtctcttaaaacgaaaacaaaaacaaaaaaatgattatattaataattcttgattatatttattttaattcatttgttcattactatataacaaataaaaggatgtagtcatcatttatcctttcaagggcaagtttggttctgaggaccttcagtgccacctctccctgatgttcctgtcccttttagtgtggtaacagtggggaggtcctacgggcaaagctgggcttctccacctccttacgatgaggacagccccacgttgcctgtaccctttacaaataagggtcctcccatttatcttttacctgcaataaaatatgtatatattaaaatacatgttttgggaattaacattgttttataacatgacttgaagaatttttatcttattttattttatttagacggagtctcgctctgtcgctcgggctggagtgcagttgcacgatcttggctcacttgcatgatcttggctcactgcaacctccacctccagggttcaagcgattctcttgcctcagcctcccgagtagctgggattacaggcatgtgccaccacgcccagctaatttttgtatttttagtagagatgagttttcgccatgttggctaggctggtctcaaattcctgacctcaggtgatccatctgcctcagcctcccaaagtgctgggattacaggcatgagccaccatgcctggcctgaataatttcaaattgccctaagacaaaaatatcttgaaatgtttgtttatttatttatttttttaaattgacttcttgaagtattttacataggatctgaaagattcgcagttttaaaatgactggagttacattgcagtgttaagcttctggtgaatttgactagcatttatattcatggctcgataacgcaagacagattaaaaaaaaaaaaaactccccatgacatcaccactgcctccaaataccctttctttatctcatatgttagctaactgatagttttctggatttctagcaaatgtcctgctggttgccagattatgtcaaggcagaaccatctggtaccacctttttccagctgtaaacactgcaataataagtaacagaatggtcaaaatcactagacagccagaatcgagaaaggcatgtaaatgtgtttagttagggctgtaagagccttgattttttttcaattctatacttttataattctccactcttcgtgggcttattaacacaggcctcatgtgagcatgggattagggggcagctgaggaaatccttcatgctgtttcagtagcatgaagctgagctgataacatgatgctctctcgagtctattcagatgttggacaactgccaagcgcccgcacttgtccaggagcattttgctgtcaggactaatttagccttctattttgggaatttatttattgagttttgttatacctcactaaggaaatgattttacaaatgattttcttgatgagaatctggtattggccctatgttttggacttagttattccattaaaaaatacattaatactaatatcgggacaaactaaaggaagttggtcgtttaaacagttatagaagataacctccagaaaataacctttttttataagccaccatacgtttctcttatctaacacaattaatcaaatttcctcctcctctactgccaagcttttgttcttgccccattgataattattgcctcactgggtagtgattattcagctgtctgtgtctcctgctccactggccttcagtgagtaagatggtatctcagaagaccctgcctggtacacagtaggatttccataaaggtttattgaaatgaatattccttgtgtggcactgacttttcattgtagagtctaattaagtttttccctaatggtctttgcaatttttgagggtaaaaaaaaaatgatcttatttatattttaattcccagcattttgttagcattcagtaaatggtgagttgacagccaagaagttttttgcacttaaatattttttattcgaagtctcggtctcctgtatacccacccaaatgtgcgcccactttgagaaatggctcagtagcctttatcagacacacactagaatcagtttattataactctctgaagctggagaagacaatggcctctttatcagccccatactgaacgttctaagctcacagcagggaggtgctccagtggaaggctgcacctgcaccccacagctcttgtagtaccttcatcggatcctgctgctatgaccagaactggctcttactggcagacctgaccttggcccctcttctccatgaagggtctgcccaaatgtggaggggaaagaaaaccttttcctggttctttagagtagttgacttacttgagtctccatttgataggttgagattttcaaaaaattttgctgaaaaataagaaaaacaaaataatttataaaaggatacccaattaagaaatagccatatttctaaaatatataatttggaaccatggacttttggtagaaacatgaagagctttgctatctcgcacattcccattatgctaagtaaaatcatcagtgctgtgatgagtgattgagtctcagtgagtgattagacccttctgggctcccattttataatgacacacctcaaagagctccttttcccttctgaaaagaaatggccccctagacaaccatgactagcaggcctgtcaataactgttacccacctataagagaacttagttctatccatacaggataagcagcctcctcacatattcattctttgttttctgaggtgaatttgtcagtttagttcagtttatgttaatttgagccatttatgttatgtatgtaaagagtgtatagagtgctaattatacatttttccttatgattgcatcttacatggtatacagatcatctcctcattctttgtgaaatccattttaatccaaatgtttccttgaatgtaatacatttaagaagagctgtctacttctctttttaacttcccaatactttaaatagcctaaattatctgaacttggacatgcatcatttaaacaccaggcactaactcaagaatcacctggcaggattaagagaaggataaacattgtcaactagattgctttcatcattctaaggcttcagattaaaatcctttctgtccttggacacatcagaagacatggatcaaagggaagccaattcattactccttctgattcagtgagggggttgtgtctttgaccaacctgttcttcctgagggtgtatcaaaaggagacacaatcatagcgccacctttcagggacagtgctcatggttaacctcagtcctgcaatttgatggaagtgttgggccatttatagaaacacaaacctcattttgtttcctggagtgcaaactgagcctggattttcttgatgttgcaggggtgaacagcctttctcagtcactcagtgccaatccattgaccgcctctacccttgtccacctcgacctctcagggaacgtccttcgtggagatgacctctcagtaagttttcttttctttattccatcttcgaagaagctgtgtttaataagcctggaataattctaaacatgtctttgtagtgcattttcctgcctctctctttgtcatgacacctttgaatcatttagttacgagcttatgaagtgttttactgaaaattccagagcattcgttaattaaatgtcatatatcaccacaattatttttttttctcatttagtgatgctgaagttcacatttttttggaagtaatgctgttgaagaatttttttcttcatttaaaaacattagcttacagggaccaggcatggtggctcacacctgtaatcccagcactttgggaggctgaggcaggcagatcacgaggtcaggagatcgagaccagcctggccaacatggtgaaaccccatctctactaaaaatacaaaaattagccaagcatggtggcacttgcctgtagtcccaggtactcaggaggctgaggcaggagaagtgcttgaaccctggaggcggaggttgtggtgagccgagattacaccactgcactccagcctgggcgacagtgtgagtctccgtatcaaacaataacaacaacaacaacaacaaaaacccattagcttacaggttaaaattgcctggtaaggaagattgggcacattaactgaactttctcattattattattgttactgggaagactgatggttataggttacaattgaaagggagtattgggataaacctgagcactcgtctattccgtgaataaaatagggagaagagtggtcaacatataacctggggccatttcttcggagtttgaatatgaaggcaaaaactactctctcaattataataaaatttttaatgtaactgaatcaataatgtaatatttggcagatctttgacacagtggattaggtattatctcatttccatatgtggcaaatgatcccctctagtcaccaagatagaattgtttctttaacaacatggcctacacccagcggccatctttgaatggccttaatttgcattccactgctttgccacagggctgaaaaacactgtgaaatttattcttatttctcttgttttggtttacctgtaaggcaggaagtacaaatgaaggcctttttgtatttttttttccttttcctctcccttgaacttaaaattatttaaataatacttgattcctggtgtgccacgatttttcaatccattttccagtttcagttgttaccttcactgacagttcataaatctgctcccccccaaaataaaacaaggccaatgtgacaccaccaaaataatactgtggcaaagtagaagaatagagggaaggataaaaggaaaggctaaagattaataagattcagctaaaataggaacattaatagtcacctaaaacaacaaaatagctcaagatttctttttctggccagggtgggtcctgttgtagcttgcttctggggagtggaacgatgagacctgagtgagagtgggctggaggggagagtgggcggggaaggcaaaagttccaggagcctggcggcaggtgcaggagtttacctgaccctgtgccctcagggaaagcagcctagcagggcctggcctctttggagaagtgtggccaaatagtcttgtcaccatttcatggtgataagagctcccccagctggtagctgggagcaaagccacagtaaacttaaaagtctcttgagacaatttttgccaggcaaacagagagagagaggcagaggatcttcatgtgagagcaaaatgacttttctgaatcagaacttttcataacaacatccattctatggctgggtgtagtggctcacacttagaattccagcacttttggaggctaaggcaggtggatctctggggtccaggggtttgtgaccagcctggacaatatgttgaaaccctgtctctacaaaaaatacaaaaattagctgggcgtggtgtcacatgcctgtagtcccagccactcaggaggttgaagcgggaggatggcttgatgccgggaagtggaggtggcggtgagccgagatcataccactgcactccagcttgggcgatagagccagaccctgtcttaaaataaataaataaataaataaataaataaataaataaataaataaataaataaaaaaaaataaatgtcattctgtgtgtatggttattttaaagtgttaagtgtttacaggctatttttttgctcttctgaattccttgataggattcttctgaagcaccatatagccaaactgctacacatagtaaatgtttgcaaggacgtactcagtataagcttgtttgtttttgcaagtatccagtggcatccagtgaagcagaggagaatttaagctatttgcctggtggcagggagcttggactcagcttgttatgggtgggctctggcagttgctacacatacagggtaattccagaacaacattgctgttgatgttcagtatctcagttgaactgatctgttgatcagtctcattattttgatggccttgaatgagaggactggggaagtttaagcattgtgaccccctgaaaccagaagtgtcttagctattagtgaaatttttaaaaaagcactcatattgctgccaagccattcttgttagctttgagaagtaactaagggtagaaaaatcattatgtcggacagaagagaggatagcctgagaccatcctgtggttcagattcagattcgtagttctgcaaacactttcaaaagtgattagcattttgatagagtgattgcagttcaggtggtattttaatctcaggggttaaaatgaattagcacggttccaaaattgtataataaaaattaagctatccaggaaaactaagtcatgcataacaaaatgggggtttggttttcaatattccatttggcctttttttaactcaaacataattttaactattcttgggattttcactgtcagggaacctaaaggaatgacagaaaattctgataatccccttgggaagagcagagaatgatctgagaaattctggcaacttccttttaaaacattaacttgcattgtgtgtatgtgtgtgtttctagaatcctaacatttatcttttattttttttcaagcacatgtataattttttggcccagccaaatgccattgttcatctggatttatccaatacagaatgttccctggacatggtaaatttaaaatatatatatatcttgctctgaggggtctcagaagagctatttagatgggatgtaggggacctctaataaaagattctcctggacctagaaatacttgaaaagaagagtgccttatttctttttcaggtctgtggagctcttctccgtggatgccttcaatatttagctgtgctcaacctctccagaactgtcttctctcaccggtatagatttatttctgctctcattgtcatctggaagtgtcttcttctgagaaaagttgtagtgataaggaaaacagtgataaagggtgaatgttgtatatgaaagaaggcagccttaagcattatctatgaatattagtccttgaacattcaagtttttgttttatcattttaagtgtaggttaatgttcttaccaataattctagcctgcctgcgtgaactatgtgataatacactatttctcctatgtggtcaggcaatctgtcttaatatgggaaaaacccttttagaaacttttataggtatttctcacgggtgagcttggatgtaggtataaactactttcagagagtaaagagaatagttatctcaaagctcatgcattttcacttgtagaagtaatcgagggccagtctgactacttcacttatacactcctgactttaattgtttgcagaataaggcagtagattagaagcatcaaggattcacagacagtagcaacttagaatgcaaagagactgcagaggaattatcagaggaattatgaaaagtacatgggttagataggtatggaatctgggaatatctaaagaattaatacagttcaacacttagcatttataattatgaccataaattataaataatattttagttatatgattttaaataacatgggtattggttaatattagaaatatttttatttttgctagtttttaaaggccttatatatttaaaaggataaccctcacttatttggaaaattcagttttgtagcatgctttattccataactgtgccttgcaaatcaattactttgtatgttaaagtactattttttattacttcaatagtgattaaatctttacagtagcaaaaatatgccacaaatacctccatagattaaagttagagagtgtgaagtctgaaaatataatggtgggaaaagttgaattttccatgataactatattttggcgaacatttgagagttttaattgaaacctagtcaactcatatatttgaagccagcttataaagccatgctttggtggaggagtaattgactggggaactaggttacaagatgaaagcacagactataaaggtttttgtataatcagcacttttgagttcaaaatactgtgaattctgtgatgactggtcttcagtagagctgttaagcttatagaacagaattgcgctaacaaattgtcttgtcttccacatgaaaggttgttattaaactgtttaatacctaatacgttacctagatatagttgtagaaagcccttagtaattttgttgaaattactgcatttacgttgaggtgtggattgtcagccagactattcattcttttattcacagataatttcattagtgtatccatcaggataagttagattgttccacagtaacagtgaccgctttcctccaatgtcgatggctttcagcaacagtgattttgtgacatgtccattgtgggctggcatataaccttcactccaggaggcagagcagcctcctatctagaacattcacagtcatatagcagagaaaaagagatcatggcggtgcacatactggctcccaaggcttctctctggaagtcatacacatcatttctgctcacgtctcactggccaaagagagtcacatggccaagcctgctgtcagtagagggatgaagcatcatccttcttcaaaaaggggcagtgaatatttggaaacactggaatgctcaaaactaagacagaatagcaggagaagaaatatatttagagtaagttaacagtattttctcagcagaaagtgaacaagaatatacaacttacattgttccactatatggaaacagagttgtttgagatttcttatatcacatagtctaccagaattctctttcctcttagttttatttttcatcttctcagatattttggttgtttagatttttcttctcaaatagtcttcaattgtcctgttttaaaactttaaaaaaaaacctgtcaaatattgacagattttcccagatctctatacattaaatattattattattattattatttaaagttagtttttatttatttatttattattattatactttaagttttagggtacatgtgcacaatgaaggggaacattaaatattattgaatattatgtggttgagctaaaccactaggatgccctcttccctgagattccatgagtccctccacagaatatgaataactatcgttaagtgagtgcttactctgcatcagcctaagtgctttacatatactgacttattcaatccttccatcatttctatcagatagaacagaacaagcacagtgttcagattccatcttggactcctgaatcctgtttttcttaaacccttatcatatagtgttgatgctaccttattattgagctgtatgatttgatccacatacttttctctgtaatagcaaggggatgtattcagaggttatagccattttattttgtagttttgtctttcactgttctaatagttggcctgaaatgattaggtttttggtatggacatactagctgaataggctatttgtaatgcaggcttcgtgccatttggactttctgtgctgttttagctcaacatcagatcacagtcttgttgcatgtgaaacctgctacatctaaaaacattgccaaatgcagatattgatctctaacattttgtgccacccagtgggaaagcctttaaattggtgagaaatatacatcttctctgacctcctatttttaaaaattccaaacctggagtttcctgatcaagaggtaaaactcaatgaattcattggctatgaagaatagcaatgaattgttttatggactaaatatttctttacctcacttatgtggttcctttaatgatattggatttatggctttaggttttggacatttatttgtttccatttacttttaaatttctgcagaaaatatgactgatttgtagatttcacagtgtctgaataatcaatgaatatgtttgatgaaggtgtaaccgcttgtgtaactcttgtgtttttttcaggaaaggaaaagaagtacctccatctttcaagcaattttttagtagttctctggctttgatgcacatcaacctttcaggcacaaaactgtctcctgagcccttaaagtgagtggttaattcactttctccagagcttttaaagttcaacttatttttacgaatgtgcttgagggaagggagaaagatatataatccaaagacaaaaaccacagatgagaatgcctttttactctggggcagaaaaataaattaaaattttaaaaagtacattgtgcactattgatattattgcatcttctaagaaaaaacatcttttggtttatgaccttggcaggagtcactgatctacaaaagttgtactcccaggtacttactattgcttttatattaacctctgttcattccatttcaggcatattcgtttgttcgtgtgtgtgtgtgtgtgtgtgtgtgtgtgtgtgtgtgttttcatcagcatttactctaaatctttctactaatagtaataaactctaaacacattgtatgtatgcaacagaatgaatttttagctactttggtttctgaattactgaggttagcatgggctatttggcacttttatttggcagccaacttatgggttaatatccctagtgtaggtatagtggtgaagttaaaattgttagctaaattgaggtttgagaataatttattatccttgagatttctgttgactattgccagaaagagtcaaaagtttagtgtacaagttcagtgaatttgactgtagggtcaaattctctttgagtctaaagaaggtattttcaagtagttacgattatgaaagttgtcagatatgctcaaatgtatgcatggatttctcccttcccagctgactgtaaatcagcatttaatttttcccttgtaatgtgtatgaaatgttaaaattaatgtctgctattcatcttactagaaaattaagcttcatttaatttataaattttcttttccttttttatttctgttttgagaggtatgaagttcttgatttcatatagtaccagatgaccaaaacaatggatgcctttaaaaaagtagatccaggctgggtgcggtggctcacgcctgtaatctcagcactctgggaggctgaggtgggcagatcacttgaggtcaggagtttcagaccagcttggccaacatggtgaaaccccgactctactaaaaatacaaaaattaaccaggcatggtggtgcatgcctgtagtcccagctactcaggaggctgaggtgggagaatcgcttgaacccgggaggcggaggttgcagtgagctgagattgcaccactgccagcctggcaacagagtgagactccatctcaaaaaaaaaaaaaaaaaaccagtagatccagtcaagtgctgaaaaaaaagtctgatgttatattattgcaggcttaaaaaatgttgagttaatatattagagatccctaaatataacagccacaaataataaacacctcatgatttggccgtttgtatggatattaagaaagctatcagaattgtattctaaagttccattataatcattctcatttatgtattcattcaagtaatacttactgagcatctacagtgtgctagacaccggatgacaggataggaagcaaaaccagagaaggtccttgtcctggtaatatatcagcaggaaattagaatattcaaaatagttttctatttttaattgtttcaatgttgtttacttttgtataatatagagtaacattttgttggttaatgtgactgattttgcggaatattccagtttgcaacaaggctggacttactgtactttgttgcatatatacctgtaaatgttgtacttcaaagatattttgtaattgttaaatcttggacctgatgttattggtgtgaatgtttgatagtgttaaatcagtagtctcttcagctctgtgttttaatcagcaaaaattttaatatggggagaaagccttcatggctgaagattgtgtaaataaaattccatgtatacatttaatgtgatataattatttgaaaagataacacaaaactgaagttctcaggtttatgtgtgagagggtgaggatgaaaaggaatttgcacagtactaccctaaactagacactgcgctgggtgcttacatatggcctgtcacctttaatgtggatgacagtgatgagaagttagtatcattatccccattttacagctgaggatattgaggctcagagaagctaagtaatttgccccaaatcactgttgaagattgggtttcctgagcatctgactttgagatggagattcgcaagtaggatatttataaggacattctcttgggattaccaccggtgaaaagggaagggggagaaagcaggatcagacaaaagggagaagctgcactgggaggctcttccagtaaagaggaagaacccagagggggttctgggaagtgcctagcagtgtccgctgctctcagccagctgtcatgggctcagcagtgttccctacctcattccaccttcaactgcagaaacccttgtttctctaagggtttgggattagtagccatgagagaataaacgaaagcaacacaatttcttttgagacagcgctttaagtttggacataacaatatttttccccacaagtttcccacttaatttgagattcttttacaagcgaattggggaagtagagtgttatgctggaggtggaagggggaagcaagacagagaatatgaccgcttacttcattgttgcgattttcctttgaggccttttttggtccatgttaatgtatttcaagggggtttagagaacatggtgatgctgttccttggtgttttctaaaattgctagaatagtctggttcatatgtgtcccaaggatgctctttgctccagcatcactcagagtgcagtgtgagttcctggttactgctcattcttggtctttcattttccctcccccaagcctttcttcctggacatcccctttctccctgtcatgtggtaccccttctctgtgaccccatctttctggctgagtatttttcataaacctgttgaatgtgctaccctgaaattataactagtgccaccgatctggagctggaagaattaaatacaaattgttctctaagcaattttgcaatagtgattgaggatctagaagatggttgttaaggcaattttgccatcattaggttaaaataaacaacatattttgctatagaatttttccccagtgcccagtatgctttattgtatttgttcttttattttactagggacagtttctatgggttatttatttttactagtctcatgagttgttgcctcctaatcattgggcttctatagttaaatgccttaaagcatatcatttgttttcttggccttaattcacatgtgagaaaagtaggaagtattttccttccatataagcatcataaaaatgcaatgttgaaatatgtgtctaagtcctagaaactcagcatatgttggaaataaaagggacctctttggtaatatcctaactctctcattttactgacaagaacttgagacacacacgaaaagtgatgttcttaaggtcattcacccattactcgctgggctgggatgtgagaactggccttttggttttcagcctccagcgctttcactgactcaatactgcgcccatgaaagaaagggggcatagtaatttttaggaaaagagaagcaatttaataagcaattgaacaagtacacagatgagatatacccagtctttctcaaaggacactgttttagaataagggattagtgaactgaatttaaaaagtgaaaaggaaggcactcacctccagcctcctaacaaggtcagggagtgggaggaggggggttttcatagctggaggcagccgagcccctatgtgttccatgccactgctggagttctctcttagtagataaagccagagaatcactagaaaagaaagtctcagagacttgggcataaaataattccctaccttcccacctcacccttaccctagggtatttttggggtatgctgagtggaggtccttttcctgggaacatggaaaacaggtaatcgcccccagttaataaatacctggtttccactcttctagtacttaccactggcagccttgtgttggagttattggcacacatatctgttttccttgcttgagagcaggaaccatcttatgttcatctctatgtttttcacaaagtctgatttagggtcttctgtccacttagtataatttagtggttgtgtgtgcatgtgtgaattttctgtttcaagcttgcttgatggtgttggattttataggactgacttgtcaaagtggatccaagtgattagtctaatctcctcaatttgcagatgagaaaattccttttcagagcagtgatatgatttgtctcagctcagcaggtagttggacaggcaggatcctggactccaattcaagacatatgccttgttttatacccttgcccacccactactgtaggtcgtttaataaactcatctagatataatttgacatcctgttatactacagagcctgacttcctcacttacatattccttagggaaaactagctttactttgcgactctaataacaattgcttaataatattctaaacgttattaaatctcttctcaagcagatgcagtgggaatttatctgtgatgagcacaatttaatttcagtatgcaattaggtgtgctgttggtttatttgcataggaatagcaatcctgcaggttttacatttatgatgggctcactgcctgtcaggcaaaaagaatgctgcagagtcagtttttcactgtagttgtgaggcagaaatgctgttggcattttaaaaagtaagagggtgcttggtgcttgacctgtgattcagaaaaggcagccttctttctctaggctttattcagtgtgcttgcattttttcttttgggcagtgtgtggaatgtgtatctaatatgtgtgtttcctcccctcagagcactgttattgggcctggcttgtaatcataacttgaaaggggtttctctggatctcagcaactgtgaggtaagaacacccttagattgtatactggaatagataatagcctcaaccgctttgcctttttcctggataaaatttgatactgtgattccacagggtgtaaatgaagcagaaaaataaattatacaagtttctaatgttctgtattttgcaagtttcatctacagacagccacagaacatcatttagaaagctttcaagtgtgtttttaatgacttgggttttgttgttgttccattcttggtgcctgctggctgagtattttatgatgaagccttgaggtataaaaccatagacttgctttgccgtcatgaaaatgaaacatgcagcatttgttgcaagggacaaatgtgtataacctaacttggattttgtagagcgtgaaagagaatggctgtcttattaattttactttttaatatcttgatttaaaacaagaaaattaacatacctctagaaagtatagcaatttcaaatacttcctatcaaagagctcataagaactgagactaaagtgtctatatatttatatatttttttttcttctttttttgagatggagttttgttttgtcgcccaggctggagtacagtggcacgattttggccactctgcctcctgggttcacgccattctcctgcctcagcctcccaagcagctgggactacaggcgcccgccaccacgcccggctattttttttttgtatttttagtagagacggggtttcactgtgttagccaggatggtctggatctcctgacctcatgatccacccgcctcagcctcccaaagtgttggaattacagacgtgagccactgcgcccagcctaaactgtctatgttttacagggcacctagacttttgctatcttgaaacttttactttgtgtgactagtaagaaaatacccagatacaaactatatggcctgttcagagcctgacttaacatgtcaagctttatcccttcttcccaggaatggagatggaagtctcctcattcctattcccgggcctttatactcactgttctctcttccccagcactcctaccatgtccatcttccttcccctccccaagaccctccctctctttgaggaattaactcaacatgcagtctcctgcatgcgtgcatcagcttcctaggctatgcaatcctggatgaattggttaatatcactaaatctcaatttctgtgcctgcaaaatggagataatagtaactctcccaatggattgttaggaagtttaaaggagctctttttgaaaagtgcttcttagggtatctggtacgcagaaaagttgtttgctcttgctgtttttctatctgtctgccaagtttcttccctgcctgcttcagccctttgtgatcttgatcttttctaattgtctagcacttaatgataatagcatgcacttggacaccaaatcgccaatagtaccttgcacagatattaaattaactcctgtatgcttggatgtaactttctggagggcagtatttatgtcatactatattttgtatttcccctatctcctagcaaaatgccaggcaccaagccagtactaaatattgaataagattaatggtttgcctctatgaaaattctagaaatggacaagtctgaatttgtaccatataaattgttagtgtagtatttttcattagtttcaagctggagtgaacaccaattatgtgatttaacagtcttgttgttttgaaaaaagaaaagcaaaaaacaatacaaaaagacatattgtaaaaaaaaaaaaaaaaaaaacccaaacaatagaactctaaaaaactaaccttgcgttgtggaattttcatatgcagattaatgatctttcatttataaaaacagactataaagtagaaaccaaatctggtaatattaattaattatttgtttaccagcactttactgaggggcatgccaatagtaattttatttttaattgggggaggagtgagagatgaaaggggtgggataggttattctgtcaaaaaagcaaacaaacaaaaaaaaaacaaaaaaaaaacaccaggctgggcgcggtcaatgcctgtaatcccagcactttgggaggcctaggcgggtggattacgaggtcaggagttcaagaccagcctggccaagatggtgaccctgtctctactaaaaatacaaaaattagctgggtgtggtggcgggtgcctgtaatcccagctacttgggaggctgaggcagagaattgcttgaacctgggaggcggaggttgcagtgagccgagattgtaccaatgcactccagcccgggcgacagctagactctatctcaaaaaaaaaaaaaaagtaagttggtgtaaactttactgctctatcagatcaaactactaaattagcaataacttctaatgtggttttacaatcctgattaaatatcgtgactgccagcagtctaacatcttttattcagttctgtgataaagctgggatgggcataagtgatcatctggttccttaattataggtaaactgaggttgaaagaagtggaaataatataactcaccaatggcagatccatgatgaaaatactctgtcctcattctcttttgctaatagtaatattgactgtgataattattagactactaagtatggttaggcattttcttctcaaataaattgataggggccatgttgccaaagattgctatataccttgttctttaaactcctttatgatctattgggaataactttcagataggtatagtagatgaaccctataaaactgatattttgcatgtcaaaaattgcagactattggcagtttcgtaaagttcaacttaattgctagtagactttataatctttttaacgaaggcaggaattcaggtcaaatggttaatctccgatgatgagcttgaacagtattattgtgataattccaacttcattttggcctttcacttatgcattatatgataaattgatactgccgacatggggaagtcttgaaagtattgtagtaccatgttctccccacttataacctgaatcacagtactggtgaccacatttataaagtcacatgttatgttgatgcatgaaagttggtaaaacacaaaattgtttttctaaactatgttatagtgttttatcacattttgtttcttaggcctagatgtccacatttaagtaggtttcagtttgcttctcttcataatataataaatctccccccaaaagtgtttggatttccaatataattcatgctggaatgcttgacactttgagtgttaactgtttgagtctttaatcatctgtgtttgatattgtagagtttatgtaatcctcttagaaagaagctcttactatcacggaagtttaaaatcatgaatatgtatattttctttctgcctgttctctatttagctataaaccctctccactcttagcataccagttgaaatcgtagcagcttcagcccttgactttctccgatgatcagataaatctagtcttaaaatccaaaaggtggtgagaaatgaaatttctccttgataccattgccatcttgggaggttatttttctgaggatgacttactcaggatgaggagctggcagacctaggatgagtcaaggtccagcgcatttggctggcaggtgttgatcattgtgcttggggccgtgggttggcgggggtggtggtaggaggggttgtcctgcagtttctgatgtgggctccgtaagagctcaatgcatcctgtgggtacctctaatacaagtccacctcagccagggaaacagaagctattgtgagataccttgatgtcatcttatatttataaataggtgattaattttaatataaaacatctactatatagaatttttgatccagatttagttcttctcctggtagggggaataaatccagtgattgattttaaaatcacattagtatgagtgttatagaggataaatgatggtaaaagatggtagttgagattattgggaggaaaggggaaaatagtcttaaagtaggaagtaaaagtgtttggacagggagcttagaataacttaagcaaattatttttgattttgccatatgctggttcctttattgttcattctcacctttcctaataagttggcttgtaggttctcagggtattctttattcccctgaaatagacatgtcacactcattaatttgaatgagagaggagacttacacttcatgctattaaaaaaaaagtttcctgtgggtatttagaacttatggagttgctttcttacaatacaaacatcattgttatttggaaaattaaatctaaaatgttggtctatattcttttggatctgtgatagctaaggtaataagcactgaaattaaccttacgttttcagataacttctatacttacaggaaaaaacttcggtgttccttaaggcattttacattaattatatcatcacctctctttctttcccttggtcttttagtactgaaaaggagtctcttttgtgtatgaaaatgactcaaagtagttatgggaggcaaaagagtgagccaagcgtgagcactttggaatcaaaaggccccctttgaaacctggctcagttacttagcttattaggtgactcaccttcttttcagcctttgttgctcatctattgaatggaaataatagttttcagggccagcgtctggtacaacgtcactactccagcccagcatatgtgagccatcatctggggagtaaaaggtttgagatggaggagctttatttggaatgtcagaattgacatcataggtcagtattgcccttctaaacatttttatttagaagctttataaatattcagtctttaccaaaacatttttgggaattgccttcaaagctattttacatctttcaagaaggattactctcatcagtttatggtgagacaaattcttcttgaaacctgattttttgatgcaagacagtattatacttcatggccagattagcttcagaatggcctgtggctgatccttattcattctcaaagggtaaagatttagtgtcagtacagatgttcagagaaatgtgtgtgttccattgccctgtaggttagttctaaagagcttcaaaaccattttctatggcagtagtgatactggcattcatgagtagtattcccatgtacccaagtatctgaagagaggcagtggatctttcattctctcttttttttaattgagacgaagttttgctctgtcaccaaggctggagtgcagttgtgcaatcttggctcactgcaacctgcacctccgggattcaagctattctcctgcctcagcctcctgagtagctgggattacaggcatatgcccctgtgtctggctaatttttatattattagtagagatggggttttaccatgttggccaggctggtcttgaactcctgacctcaagtaatccacctacctcggcctctcaaagtgctgggattacaggtatgagctactatgcctggccatgtgcattcttgtatgtttaaaaatcttataacttcatagttatacattaagagaagaattggtaaatgctgggactaaattcttcaaacttagtctccttccaaatagacaaaagtctctaatacttcagagaagatgcaaagggcaattaattatagctgtggcttagttgtaggcctgggtgtgggagttagtttctttaagtggaagcttttctgaagatgatcctacagtttattgcaattcatgatgagtagaaaaaagagcaccaaatactgacatttgtaatgagttttgcagcaattgaatacaaacttttgagacagtttcagtccatttgatagtcattcaaccaaccttgaggcaagcatcattgtagtgccccttacctatcacttccctgtcaggccaggtacggaatgcagaattgcaaatgttccacgtgacaggatgcatgtatgaaagcaatgaatatctgcaactgtttgcaccttgaaaatgactgtatttgcctgggcatgatggctcacgcctgtcatcccagcactttgggaggccaaggcaggcagatcgcttgaggtcaggagttcaggaccagtctggctaacatggtgaaacccgtctctactaaaactacaaaaattagctaggcatggtagtgcacgcctgtaatcccagctacttgggaggctgaggcaggagaatcgcttgaacctgggaggtaggggttgcagtgagtcgagatcgtgccattgcactccagcctgggagacagtgactccgtctcaaacaaacaaacaaacaaaaaagaaagaaaacagctgtgtttatatacatccttcttaggtactagattgttatttggcatcaaatcctgctagaaagtagacattatgaactggatgttgtctaatcatgttttctgtccttggagaaacctataccattcagttttatgtatgaaaatttcccaggataaaaattaatttaaaaaaaattactattggaacccctctgaaagaatagcagataatttgggggtcattttatatttttgccttatctttttaaatgacaaatgatattaaggaaggaaagtaaattattaaaagttccttcttgattttaattttccttgctgtccttatccccattatggatatttgagtgtttgatataactttttccttagaattatgagtaagatcagaaacgttccaccttccttgaatgagaggatactactctcttgaaagaaagacgattttatttttaaccgtttaaaaagtgttcaacattttagtcacatttacttctctttgatcttgctttcttgtaaataatgctggtgtgtgggatccaaataagggtaatttaaaaaccagttttacatgcacacatgcagacagcctctaattatgcaaattcatttaaaaggattttcatttacagtaatggaaaagcttttactgttttgggaaagctttagcttttggggaattttagacatttaataatctgtgacttgaatgttcttggtaactaaagcttagttattttcttatctgaatttttgttttgggagaaaattttagttagaagtattttttctgactctttgcttttttacattttgtattgatagaaactttagcttcttctttattcttgttctgcatactgctgataatggtttctgttttttctccttgggctttcattagcttggccattgtgtaagtactttatgaatcaattagaatatattgatacatttgattgttttttaagcattggaaagtatgttttatgtgtgtatactacaaatatcagtaaggagtatgtataaacaaagttaaacatttaaatgttacctatattttctatttctataaatggaatatttttactgtactttacaatgatagaacatagaaattttctaacagaaattttatttctcaacaagtaaatcactatcagcaaatatgaaattgtgaagacttaacgcatttacgtttatcttctcaaaagcatacttttttcttgctctaaaaatcaaattgttttttgagaagtgtttgcttaaatgagttcttgctttagctttgacatagtgtatgtacacatttacttcaagtagtaaatatctgtagtaaataaactatttttatgtttttttaaacttccaatctatcataaaccaatacatttataaaatataatacgaataaaatacaagaaatatttagaaagacatagatatgcaagcccccaatttttatgattagatacaacagacctaaaatttttactactaaggtttctaaaaatttttacactcaatttctgtacttattcatctcaaattttgagtagcaaggtgctggggaagatgtacaggtgtcatgatgagataggctcgatggggcatttaggtaagctggagagcgcctgagaaaacaagcaggtgtagtgaaatgggcctggcagtcagtcttgacaatagcttcacacacaggttagaagcccttcagctgtgaagttggttttggtttccctgaagtatgtagaccagtcccttggagaggtctgcctctgtgtaatactctacttcagagctcaccttagagcaatctgtcaccttaaaaagtagaaatggtgagatgcggtggcacatgcctgtaattccagatacttgggaggctgaggtgggaggatcgtttgaacccaggagttcaagacaagcctgagcaacacagtgagacgctgtctcaaaaaagtaggaatggctgaatgtaaatatcccaactgaaattctcctgatatcgcatccaaaatagggaaatgaggattcttctaattcttacatcaaaacctagacatgtggaaaatagcaccttgtactgtaaatttgttgttaaactttttataaattttaattttcctacatgagtaaaggacttgccatgttccttggtttatagtaggtttccaaaaaatgatagtttgtttttcctcattagatagtaagtttacagagcaaaagggccacagcttaggaaactttgcatccttcacaatgccttacacagagtaggaactcaacaaatatttgctgaatgaaaaacacagagatattatgactgctataaagtatgctttggtttcatagaaaaagatgaaaagtactgtattgggtttttcaggttgtctttctcttttaaataaaattgcaaatgaggtgagaataatcatttgcacttagttttgctctaaaacaatcatgataataatattttatattaatttaacatttttccatccatggctcgaagcatttgtacaaatcattttgcagtcatctttagttagctaatatctgccttatgagtgagaactcacactcatgtcttagaacaggtagggatgggtccttcctaaaatgtttgacaatcaaagtaagtcttcattgtctcctttggttgggtggagagtttacaccttggaatcggtaacagtcaaataaaacagtaactttctcatgtataaaatgaatttattaaatttccaaaagtcagaaatgaagaaattcttctgggttgataatgcactgctttgctactatagtggcgtgggtggtggtcatcttgtttctcttttgtttttttctaatgtttttaggatttaatgtgggatcacatggcataggaaacagcagcaatggctagtgataggctctttacccactgataatagcttctttggagttgataagcttttactttttctttggtactaagtttattttaagactgactgtctctcctatttttaattttttgattacatctccagtagagtgaagactttactttgtgtttggtttgtgtttctctagctgagatcaggaggtgctcaagtattagaaggttgcattgctgaaatacacaacatcaccagcttagacatctctgacaatggtaagtcagatattgaaaagaaatgaaactgaaatattttttgaagcaagttaataaggggaaaataatcttctacccaaatccaaacaatagcttaataaaaaaattgttttttattttttgactaatagggcttttaaatttaacaatggggtatatttgtagaatagatctgtgccagagtcttactaagttgactctgtggccaactatgcaaagtctatgcagtaaaacaactcagttataaaaatatcaccagtacattgaaaagggtctgagaccaactttttgcattcttgctgataataaaattgtactcttgtttatttattcaaaagcttatttcattagcttcatttctgctgattgtagtatcatgttagtatgaacctgtgaaatttgcatagacaactttaactccacttacctcacagtgaacagtttgttggaatcttctctcacagagtggtggggagagatgaaactttctgccattattcattcccatttcctgctgacttggtttagccactgattgtataagagatttagataagtctttgtagagaatgagtttatccctgtgaaataataggacatgaaaagagagcaaagagtgcctttgaaaataaaagattagaatcccaggcccctcaggaaggtaaaggaagtcatccaactatatgtcacctttgcttaattgtgttccagctgaaaattaatttatacacatgtgttttgatgttctacttactctgattctttccaggtttagaatctgacctatctaccttaatagtgtggctcagtaaaaacagatcaatacaacacctggcgttaggcaaaaattttaataatatgaaatccaagtaagagttttgaatttttttatatgacaatgatgaaaataaccagcctcctgaaagcttttgatttgattccactgtccacatctctaaaatctctttagaaatctgacacctgtattggacaacttagtacagatgattcaagatgaagaatcagtgagtattatgttaaactttttactaaaatcttctgtttgttgccattcttactgattatttctactggattaatgctgaaatactttcagatagttttatcaacgtgtacattttccattactttttaaaaatggaataaatacactttagtagagttgtagaatgtatttaaaaactttttttactttattcaactcactgtcaattaaaggaagattgtcactaatagataaaaagaagtataaattgactcctgagcctatcttttaattagccttactactccctaactttagctaataaactaatcttcaggcatgaatttttacattctagttgactttatgaccttatataatgctgagaaatatcatattgctaatttgaatttcatctaataattatgtggaattataggggaccaaggaagttttcttccatctttaattgcttcttgaagtctagtagcactctgtatttttaatcccctttcgttgctcctgaccaaaatttagttcagggtaaagaagtttaatttcaaatagtatcttattttgctgtccttgaaaatggattaggagaaagaaaagttattttatggacaaaataagaagcagtctaccatgaatccatttgatttagagctggtgtgttacaccttatattttactgatgctctctaagattttgtccgtttcctctcaaagtcctatttggtcaccagactcagcttttccagttcctaaaactcagatgaatttgtattcctactatgaagagtcacattactcatgttttgtaatagctacttttgtaggtcatgaggatgatttttatattaatcatgtggagtatgtcacatttggaaaaagtatcattttccctcctgaattcataccagggaagagcaaattctatcacagctttaagctgacttttctgtgaaagctaagaggccaggaaggatagacactggacacttcctcacttgccgttgcccccacttctttgacagggctctgagctggtgggcaggagaaaattctgttctctttcctcttcattgtggatgtaattttcaatctgtgggctagaaaatgaatctcattattgtttaatgaattcagcacttctccttaccctcatttgctaataaaccccatattttgttgctcttatgctgggttattgaaattaggggtataattagaatgtaatttagacttctcagagtttatgctgtttgctttacgtatttaatttgactttgcatcactctgccttgtttgagtttctgattttccagtattggcccagttttaacagattagggaagctaatattacataattatacttaaaattcaccccaagatgtttttttcttaacacatactttaggaaaatttgtatttttatgaaaagtacataaattttatgttttgctcattatgtgaggttcttcaaactgtatctataattctggaagtctgttacttaaagatgatagttaaaatatacctaaaaccatatctgcagatgataaagtttgctatataaatgtgaattctgtcaagtcacaagtttgaatagagtggcactcataatgctgtacaatgaaaagctttttatgttcctgccattgaaaagtagatggctttttcagaaagcaattcttctgttttttttctactttcaaattggtaatatggaaaataatttgaaatgattaggagatgagtcttgtgatgataaaaatttttaccaatacctggtacaattgggatcattttttgttttatttatttacaagttttacatgttaaaaaataatctctttactttttacattctgacctggtgtttgtagagcttgttctttgaccagcctatggaataccttattcacccagtattatacattatgttcaattgaaaaacctacatgctggtgggttccagtgtcaccttcaactatagacagtggttttcagtctgctgcacccagagtcatgggacagtaacatagagggccaagatgacagggagttttgttctgaagtattacatatgaacccatattgtaaccagtagaacagaatgtgattctcctgggggtgcctgaagccaggagacagattctcagattaagcatgttcagctatgaaaaagaaatagtaagatttcaaatagtaatgttacacagaagtacaataaatcaagaagggatgaccttataaatatgcacgcaattcaggctggtctgtttgcattaatgactctgcctattatttttaagtattaactggggtgtattagaatttgaatatagtcctggaattgatgcttgacagctcggagagttggcagttttccagtattaggaagaagctataatatatcattttcgtagtaattgaatcaagattattgaaataatgaaagatgtaattacatctttttattaaagcatactgtgtttgtttttctttaaaacagtaagtttcctgagcctgaagtgtttttagttgtcatttccacttacctgtatgtaggatgttaagaaaattgaagaaaccaagctaaacccacttgagtctaaatgtattcagactttttggcccaggttttaattgccttagcacttaccaggccatttaacttttattaatttgattctgattaatacaacattaccttttgattttaccataaatgtattaactttgaaagccatggtatatttggatgataaggacaataatatgcttgttgtctcttggtaccaaccaaatgcataatgatgctttgttgatatctgagtcttgaaaccatcaacaccctcattctgtctcctgtagccctttggtagatgaacctctcacagatgttgctttggaagtcaatgttaagtgtttgagtagacacagacaaaccccaggctgtgtgtgggggctgtcgtgtagaccacccaggcacaccttgagagctccaatcccccaagcattgtggaacttggtcatagattaccccagaagctgcttctatcactacttcctgtagtgttgggactgcttctgcaataaccatataatttgtttagtgtggctaggacaatatagaggaccccaagcaacccaggagacatccacatctcccagggaagtctgaattctgacatttagagctacattggttcaacctggttaacctggaattcttaaccccactttaataagttatggcttaaatcaaggaatgcaaactcaaatgcccacagggctaggaaggcaacataaactagtaaagtgagctgggtgtaagtaggaagctctattaatttattgttactattattattttggtcagataccatgcaagacaaacaaaacctgcctttaggctgcgtggctttcaatatctggtttaaatggatggaaaatgagtggactggtttggattcaccatacagcttatggtcaaataaaaacgtcacacaaggcctggtgcggtggttcacgcctgtaatcctagcactttgggagactgaggctggtggatcacttgaagtcaggagtttgagaccagcctggccaacatggtgaaaccctgtctctactaaaaatacaaaaattagccaggcatggtggtgggcgcctgtaatcccagctactcggtaggctgaggcaggagaatcacttgaatctgggaggcggaggttgcagtaagctgagattatgccactgcagcactccagcttggggggacagagcgagaccttgtctcaaaaaaaaaaaaaaaaaagccacacaagtgtgacttaaaaaaagaattgtagatgtatcttctgattgaaacttaacagataaagttaaggctgagtgtggtggctcatgcctgtaattccagcactttaggataccaaggtgagaggatcacttgagcctgggagttcaagaccagccttggcaacatagtgagaccctgtctctacaaaaaatattttaaaatgagccgaatgtggtggtacgcacctgtagttccagctactcaggaggctgaggtgggaggatggcttgagcccaagaggtcaaggctgcagtgagtggtgattgcaccactgcactccagcctgtgcattctgcacagagcgagaccctgtctcaaaaaaaaaaaaaagataaaattaaagggtgatgatcaaaaagatctgagataagctaatagggagatgtggtatagggttaggagcatgaaatctggaaccagtacatctgggtttgaatcctagttcaggtgctttctaacaatgtaaccttggttgagtcacctaacttttctgtttgttggtttgggaaatggggataacagtagcatctaagcaatgggttagtgggaagattaagtgaattaatatacataaaaagcttaaatggtggttaaacatagtaattgttcaataattgtcagctattattaatcctggctggcttttatcttgtatttgtcctctattagtattttaaggtgtcatttcaccttgtataaaaataaaatgggtataaagggtgatcatattaagctgagaaatttttgttatgtttttatttatttcatcctatcctctgcttcacgctggcagttgtcagcctgcatgtctttccctggcttcccttaaaagagaagtggtaggtattcagcattaaaacacaagttctccatctttgactccagcggtccattttgtgccagaaccttaagtttctatccacgagtgtcttttaggtagtagttctaaaatcagacacgtgcagtaggtccatcccctctcattctccacgaaatgcgtcgtggagagtgggtgctgctttgatgagactgctgagtgccgtgtgtcatttgctccgcagcctctgcagtccttgtccctggctgactcgaaactcaagactgaggtcaccatcatcatcaatgccctgggaagcaacacctccctgaccaaagtggacattagcggcaacggaatgggggacatgggagcgaagatgctggccaaagcactgcagatcaacactaagctcaggtaggcagatcccaccctccctgctcatgaggaaggcttggagcagattccgaacagcaagcattgcagagctgctgggcccgaggggacctgggcttcccatgaggccatcttgaggagaagaggtgacaatgtcaagatttctgtcagaataatgaggaggctgttcccaaatttagaagtagtgattccttcggtctgttgtcttatagttctgttgtaaggtagaacctgactgagaactgccacaatttcctatttcgcatcagtgttgatagctgaccaatgtgggggtaaaggcagtgagaagctaggagggttttgtaggcaacactaagtgagcagagcccatacttctctgtgagcccaaggtcttaacccccttgctcatgcctgccgatataaagacttaaaaacaaggggtacaaaaggtctgctggttcaaaacccaaaaccaggctcacactgggtgctagctgttctctttagcagttttattccatgtttcctaagtgtggcttttctcaaggactagctccactgtcaccttgttgccatccatcattcagagagattggtgttgctacctaggtcagcagtctggtgaatgaagagttaattcacattgctcctcaagggctctttcatgatgtttttctattctccggcataaaagtctaagctgaagccaaaacccaaaatctgcagcaatttctttgaaggtcagtatgtgtgtaaagaaggtcatcgagattaggaagggaaggcagtgaaagttgtgaggccgggatcatccagacaaataaaagctattttatgtgtcagggtgaactgacaaatcctaaatacccctgaagtatacacattctgaaggtaaagtaatatttttctccccaaatagattttgtgtttaaaaagcaaacaaactcctgtttatagtaactgatgttttgccagcagagtgaggaagttcctaggattactaattaagccatgtcagggaaataatgaaaacacaaggaactatgacagattctctctagtgttttagaaacactagtgttttactgtttggggggaacaatctcagtagctgaaattctttatattgggcatggaactggttagcatcttttgtaaatagcttccacctcagacataaatataagaatatgattgggagaatatcagagaaatatcagaatttagagttttctgtctagtgaaagttagataacataatagtaagtgaacatatgtgctattgctttaagtacagtttttccatactacttgcgtggtaaatgtgttacgaatataatattgggggaaatgcttatccttgttttgttagaaatgaagatgaacattattccttgctcacataatgcagctgtactgaaatatctacacactgctgtctataagaggtttatattcaatgtgagaatcattttctttaagtgtctgatcatttatgtgatttgattttcaaacaggactgtaatatgggacaagaacaacatcactgcacaaggctttcaggatatagctgttgctatggaaaagtaagtttgaattaggatttctttctaggaaaataaaaaaacaaaaaccaatggtatatatgttacctgttgggtaatagaatcaactgtttattggggatcagaagatctgggtctgaatttagtctacagctaaccagctatgggatcttggaagacattgaatttctcctggtgggagtttccttatgtatgaaatgagggcacagatgcctgttctgccaaaaacaccacactgtcgtgagaattaaatgagatcgcgggaaaggggctgtgtgagacttgccttgtttcctttcccctttgtggaaattgtgtagatttcacaatctacactaggtcttgttctttttcctattgtgacacctttgaattcactggtgagaagaaagctgaggtccagaaaataaaggtgaaattgataaatggtaagcccagggctaagttgtctcattactatgaaagactttcttcattacttcagtaactaaagcctgcaattattatttattgttgaatttactttcccagtaaactaaatgagaaaataatagtagacatagttgaaagtaatactaggaatgtggttctttctgggcttttcgatcctcatattgtattataaaggcagaagtgaacaaagcagatttatagcattaaaaatgagaggctataaaatatgggtgaaaaataaggggcggatggcatagaagccgtttccctgggaaaggggaggaaatgctcattattttgtgtttttccagattccttgtatatgtgaggcctcccaggagggcctctcatgcctgacatggtgttgtggtacaaccctagactgggaatgaggagtccttcattcagtcttcagttctgtcacccacaagcctgtgatcttgatcaaggcattttacctctctgattaaatcttttttcatgaaatgagaggattaggataaatgatctctaagccccttccatttctaaatcctgtggctctacttcagccaggagttcaaagttactaccattacaaaatcacagagactcatctctcagccccttctctgtgctgaccccagggcatcactaaataggggtaaggcagcttagactatcagttttgcattgccactgcatgattacagacccacctatggttactcctattgcaccacaaaaccccaaatggagacatttatttacactgagctgcatctggatgctaacagcacagttgccaccctgatgttgttgtagactgccagtgcaggctggtgtttggaagaagccaggagcatgcacaaccaatactcagcatttccagattgactgttggactcccttgatcacagtcgattatatatgctctgctccaagatgccaatgcttcaaaatcacatttggtttaaataaactatgctggtctgtaacatgatagaaattggatgagggaaagaaaaattgtcaaggccgtaaaaaagacatatcgtctcttagtttcatttggctggattttctgaaggcaaacaaaaacaattttgctaaaacaaagctaagataaaaattaaagcaatagaaattacagctttctctttgtctgattattttacatgaagctactctataagttggactgggtgaatatttttttccattagcccatctagactgctactattaacttgatggttttctttattatttattctttattagtaccttattttgggagttagttgctgatttattcttttaatagatgtcgtctaaatatggctgagaagcacacgtgagtgctgctgatagtttagagtcctaaaacaaggcagctactgtgcaattttaatgtcccagttgccaccaagtagcccgaggtgaaattgagctcttcctgagcaccgtgttgtagaaatggacagatgcattttggggtggaggacagaagtcatctctaatactggcatttgtggtaggtgagcaggtgttaatggtcatctgagcacatagcagtttgcagcagggtcaggatcaaaggccagggaccagcttcagagttctgtgtgttttcctcacacaaaaatggctcactcctgcatgtttgtgtttaataggcctgccagtagcaatgggataatatacagcaatcaacagttgcttcatttggtttctcgagcctggtggacattagctcttgaactcaagctgaaaggacctgcagaggtcagagtgtttagccaggcagcagaccctttcccagcagctttaaaagagataatcccatgtatactggacatcttcatttaatggagcccagaaacttaatagactattttgtggatgctaatggcttgctttgcaagcaaatgttttgtttttatttctgtttttttcctttaccagtttggggctggttgtcacacataatcactgtggggacccaggtagagtcagatctattggttactaaaacccatgtagcaagttgatgctggactttccctaggctttccctcagttcatcttttcaatcccagtgtgaaaattctgtccttgatggaatccaaaattaaaaacaaaacaacaaaactgcattcctcaaagttgtgtcagttttgtaggtagtgtgagttgatgtggttgcctgtggtatttgcacatgtggttattacaaaggataatctgcaatctaggggcctaaatggtctggtggtttggaattttctaagctactcttgcagctatccttttggatttttaaaagaagagtgctgaattaaggtaataggaagttatttttaaataagtatattattttctcctttttctaggaactacacattaagatttatgccaattcctatgtatgatgcttctcaagccctaaaaacaaaccctgaaaaaacagaagacgctctgcaaaaggtattaaagaatcagtagcttaattacaagaaattcacatttgaattgtggttatgttcctgaacttataaacaatactttgttattttacgaagtttttttaaattttattttattttttcacattgtcttatgttcttatgaccacaactggggtaatgcatgactgggggaggagtaaactaaggaacactaaagcttgccatacaatttaagtggaataaaaaaacattcttacagcatcaacatgccagagcttaagtatagttaacttcttgattggctgggggagaaatgtgtggaactgagtatcagtttgcacagcttccctcctcttcatcctcaacagatggatccctctcttcttttttcatcaagaaatttagagtattcctgagctctcactttaccatcctcatctataaatgtatgtaaatctacacctattcctgcctctgtactggcaaactcagaggtaccttccacttcaaagcccagccattccctggtgcatttgacccccttattctgccctgtgctggaaacctctgaatcattcccttgctcttccatatcttcatccttctctttttatggccacctttctctgcattttagatgtgctcaaatatttcccatctgaagatgcctactccactcacactgtggtattatttgaggaatctttgaacttttccaacctcctttgttctttctccttggcgatgtcatccaaaagaccaccaagatggctaaattttagaaaggaaagcttcgttaatgttactggtttgcaaactgggaagagacagtctctggtgtgtgctgaatgtgctcctctcttcaaagaagggaagggcaggttgggttttatgcttcacaaggcctgcatcgtacagccgagttgtacatattcagcaggcttggggggaagctatacatgtttatgaggggagcagagtgcatgtgcagtgggtaaacatgtaacatacatctcatattcactttggggtgaggttttagcattaaaatgagggtgattttggttctttatgttagaactatagtacacaaagacagtttgtgagcagcctctgtaccctggctgaaactggtttaaggtctgcagttacttatcaataaagaatgtggatgggcgcgatggctcacgcctgtaatcccaacactttgggaggctgaggcaggcggatcatgaggtcaggagatcgagaccatcctggctaacacggtgaaaccccgtctctactgaaaatacaaaaaattagcctgactaggtggcgggcgcctgtagtcccagctactcggaaggctgaggcaggagaatggcgtgaacccgggagacggagcttgcagtgagctgagatccatgccactgcactccagcctggccgacagagcgagattccatctcaaaaaaaaaaaaaaaaaagaatgtaaggctggccctctgtccagtcagagtcgtagtggtctgggttgtaaatcacagtaaaagggatctgatagctcctgttgttagggagtttagagctgtagggatttagaaatttgccttgccagctggccctgaacccttaccccataggtaactttgtttccttaaccttagggtccatcttagttgatgaaggagttgctcagatcacagtgttaccaccttccatctagtgttccaaagttgactttcctctatcatttcttccttagctaatcaatcagtaactctaccattgtgtagcataaatctcttcattagctttccttccctctgttcccattatggataccttccttcaagtctcatcatttcttaccagaattgttgtcacatttgcctcctcttgtcagttttacatattgcaataaaaaatagccatcctatttcatggtaaatctgagcagactaaaatctttactctatcccttcctagtggctttcaggataaataaagctgggtctccttaacatagcaggaaattctgtccaggatctgcctcctgtacacttcccacttcatctctggccaactcttttgttttgacctgtctcaaggaactcgttaaaaatgcaaattattaagcctcagaaactggggtaggacttagcatttgtgttttcacaagctttcctggtgtttgtaagtttgagaatccctactgtattccagacatcctttttctttcctgactaccatgcaggtctgttgagattgaaatcaagtgtcggctcatccaggaagacctctcagaggccctttccttctctaggtgtgtggtcttaggatttcctgtgctcctctctgtcattggccttgcaacattgatttaagttacctggctccatgttttattctcctaatggtctatgagttacttgatggcagagcttatgtattttttcatcttgcttattctcacagcacagtgcctagtatgtatgactggatacttcattgattgattgattggttgacagggtctggctctgttgcccaagctggagtgcagtggtgcagtcatggctcactgcagcctcaaccacctgtgctcaagtgatcctcccatctcaaccaggactacaagcgtatgccactgtgcccagctaatttttaaaaatttttatagagacgaggtttcactatgttgcccaagctggtctcaaactcctgcactcaagtaatcctcctgccttggcctcccaaagtattgggattataggtgtgagccaccatgcctggtcgcttgaatgctttttaggcatatgttgaatagaagacaatatgattggagatgagagagaaaaaagctgtggtatggcaaaagaaatcaagatttgaatttagaatatctgacttaaaattaaactcgtcccataaccttcaataagttactcaatttttttgaaatttatttttttcaactgtataggtaggaaaaataaagctatgtaataactatgtttagctgacaatatgtaattcttactgggtgtctggcactattttaaatgttttacataaattaatacatgtaatccttaaaataaatgatgcagtaggttctagtattacagatatggaaaacaaagagtaggaagattaatttgcctaaggtgaccatgaggatccagtgaaacagtatatgtgaaaaggagtttgtgaaaagctacataaaaatattagatatctttataatttccaataggatactaatcagttttgaataaaagacatattctagagaaaccaggtttctggtttcagatttgaactctcaagagcttggaagttatcactcccatcctcacaacaacaaaaaaatctgaacaaacagaaaaccaatgacttttcttagatctgtcaaagaacttaagccacaaggaaaactatcaccctgaaaactggggactggaaagagaggtacagagaatcacagtgaatcatagccaagatcagcttgccaggagctgaagctagtaggataataacttacaggaccacttaaacagtaagtgatgaattgccagagacttagcacagactagcttaagagccaaaaactcctaggggtccagttttagggaacccccaccctttcatgggttttatttccatgagtcccaatgggctatcgcagtaaagattggagaaaaatttcctttttttttctggcagggggaagggtaaaataaccattttgaaatatactcagagcattctcttctaaataacaaagatctaccagccagagaaactactttagtaggaccttacctgaacaggggaaagatgattaaacaacccgccctctctaacctgtctcacataagggatagggttgaaaaggataagaaatatttccaaaggccatagcccagggaccaggattgcttaaaaacaaacaaacaaaaactaatcataagattatagaatacttccccttcctaacaccttatcaccatgtcaagtaaaataacagtggattacaactgagcaaactgcaagacacagattgtaattaagaaagagtttctagggaaaccccaaaataatgggatacaaaagcaaggacactagaggaaatcaaagcctctggcatatacagctacaacaaatactaaacagagcccagctcttagccagttaacatataaaacctcacactaaaaggctgattacctcaggttgtattaccaggtatgtcattttcagctttcagccaaaaattacaaagcatgttaaaaagcaacaaacacagtgtgaaagagagaaaacaagcatcagaacgagacttatctatgataccagttttggaattatcagagcccttaaaataaccatgattaagttgttaagggctctagtggaaaaagcagacaacatgcaagaacagatgggtaatgtaagcaggagataaaagctcttaagaaaaaaaaattaaaaggaaatactagagataagaaacctgtaacagaaatgaagaatgcctttgatgaggttattggtagactggacatggctgagggaagaatcattgaactctaagattcttcaatagaaacttcccaaactgaattgcacaaagaaaaaaagaaaagaaaagaacagactatcccagcactgtgggataattacagaagatgaaacttgctactaatgggaataccagaaggaaagaaaagagagaaaggaacagaagaaacatctgaagtaataatggctgataattttctgaaattcacaacagacactaaaccacaaatccagaaagctcagagaccaccaagcaggataaataccaaaaaagcacccataggcatagcaaattcaaaatgtggataaccaacgacaaagagaaaatctttagagaacatagactaaaaaaacacctgtgtattgagaaacgaggataagaattacgtcactctttttgtcagaaaccatgtaagtaagaagagagtggagtgaactatttaaagtgttgatgcaaaaaacccccagcagcctagaattctatatctaggaaaattatccttcaaaagtaatggagaaataaagactttctaggataaacaaaaactgagggaataatatatcactagtagatctgtcttgcaagaaatgttaaaaagttcttcagggagaaggaaaatgatatagattacaaattggatctgcataaagaaaggaagagtatcagagggaataaaataaggtagcattatatttttcttattatgaatgatgtaatagatgactattttttcagaataatgataaccacaatgtactgggtgaatgtggtataaaggatggaaaaggaattgacaatattctgttataagttacctacactactcatgaatcaatatagcgttatttgaaagtagacttggattatttataaatgcatactgcaaacactaagacaaacactaaaaacttttttaaaaggagtataattgatgaactaggaaagaagagaaatgtaaccatacaaaatgcttaattaaaaccagagacagtagcaaaaaagaaagataaaagaaacaaaggacaaatgtaatagatagaaaacagttacaaacatggtagatatgaatcctactatattaagacataattgacaggtcagaaaattgaaaataggtatagaaaatggacattcagggccgggcgtggtggttaatgcctgtaatcccagcactttgggaggccgaggcgggcggatcacaaggtcaggagatcaagaccatcctgtgaatggtgaaaccctgtctctactaaaaatacaaataaataaataaataaataaataaataaataaataaataaataagccaggcgtggtggtgggcacctgtagtcccagctactcgggaggctgaggcgggagaatggcgtgaacccggggggtggagcttgcagtgagccgagattgcgccactgccctccagcctgggcgacagcacaagactccgtctcaaaaaaaaaagaaaatggacattcaggacaaaatatgcagatatgttaactgtaaaatttgtgctttgttaataaaaaaataggtgactttaaagcttatatttattggtttcttttctctcccctcccctttccttccctctcattctcctgttcttctctcctccttcgcctctcatctccttttcctctcctctccttctcttctgttctttttttttttcttctgagacaaggtctcactctgtcatccaggccagagtacagtggtgcagtcatggttcactatagcctcaaattcctgagctcaagtgatcctcccacttcagcctcccgagtagctagaactacaggagtgagccataatgcctggctaattttttaattttttgtagggatgaggtcttgctatgttgcccatgctggtctcaaactcctgggctcaagtgatcctcctgcctcagcctcccaaagtgttgggattgaagcatgagccaccacacccagcctattgggtttttttgtaaaattgctgtgttcttacatattcaagtttttattttaacaggtggatttttgtcttctggaaaaaatatgactatttacttttactctactgaagaaaaaaatactgtgattcaatactcaatcttaaaaacacacacacaagattcctttactaaaatacagattttttgtgtttcgtttttgcttctttcgctggtgctgttttcagcagtgagaccagagatgtctgactagctctaggttatctcccagcttgctctcagctgtccaggggagcccagtaaacctgacaatgacacctttggtccttcaggaagtgggtttttttgtccttagtctgaaatggtacatgcaagcaaagtttgctctattaatctaagatgcaaataattttggtggtggtgtatacaggcctggtattaaagtcacttgaaaattgttactatttcttccttttgaactggaagcaccactggtgcatctggggaaatgtctggaaggcatgagccagccttggatgcactgcctgtgtgtgagatgagccttctgagaaagcaaacttctcttggacccagccacagccagtgctgcagtgaggccaaatgtataagaattaataaagcaaaaggaccggaagctgggtggtggtgtgtgcctgtcatatatttcaagcaagaatcttttcagcaaaatattttgcattgatagtcatgtcaccttggaaagagatgacttcttgggaagcagcaagagaaagtaatgtaatatactgtcaaggcattaatgtgccactttaatgatgtttcatttcaggtatcttttcgtttttgtaatttcttcatttatgtttaatggaaaggtacattttgttctgctttatattttcaagggatcgtaattatagtctgtattttaatagtttctaattgatattaagtaatagtcattttagcatatggaaaatgaaaattaaaatgtaaaaatacttagcgcttcagagttattagttagttcttaaccagggaactgctgtggcaaattaaaagccaaatggttaagtgatgttattaaaaacaaacaaaaccaacaaatttttaaaaatagatgacaaaatttaccaacctcagattattcctttaataacatctttataggtatccatcattcttaatagttaaccttgcatttatgttaaatatgtatttattgcatattcttcttgaatgcttattttaatctagttatcatttatacctttgaatttttcatagtagataatctatgtataaaaatacagaaatctattttttatttgctataattttaataattcagtcctgtttttgagaaaatatgaacatttgatgggttaatgaaattagtatatatctttgagttgtaccagcctgtatccttcaaatcttgttgcgattctttctctctctttttacgtaaaaataaagcattttctaagtgctgatacattctacagctggaataaggctataagagatttagagagcaccacccttattccttggggatatttatttaacttctgaactgtggagtagttaaaaattcatgtgagagaaggattgagattgtgtgctgaaagtgatgaaaactcacgaagtggggtctctaacccttcaggcaattaaaagcttgcttatctttttcaactactgagttacacaaaaattactccaattacctgcaagttgaatctctaactaaaaacaccagtactcacaatgaaagccagtttctccatcccatgtgttttgtggggtcaaagcactggcaggatgtgtatattcacgcttcggtttttaagttcggcaactgactgtttcacttatactttattctccgctgggttgaaatgtattcttgagggatgcctgtgctttatttccagatagaaaactacctgctacgaaatcacgagactagaaaataccttcaagagcaggcctaccgcctgcagcagggtattgtcaccagcaccacccagcaggtaagcgagccagtgcctgtgacttctccttctattcttaactgaccctctgagagcaaaggacttctagcattcgagtaatttccaatgggtcaataagaactagtttttgaaaatgacaacaaatctaagtagagtttgagggaagatactgaaggaggaaaaggtaggctaattctaaggctaaatatgcacttttaattatcaatcaacaattgccagtaagataggtttctatacaaatattaggaacttttgattataatagataataaaatctgaaagtgatcaaatttgctactttggagacattctgttcctttctctttattccttcacacttccatgggtagaatacagattcccagattttatgttcacaatgtcaggttcattaaaaaaagaaaaaaaattccgagattcttttgaagaaaagtttgatgaatattaattaacacatgctgaagagaaactgaggtgtttttctcttatactgcattcctcttctctctacccagctttaccaaagaaacagaattataataatttaaaaaaatgtgaaatatttcttttccaaaaattaaccaaaaccaaaaatcacaagatatttgaggaaaacaatctatgtgtcaaagagcgagatgaacaaaggaattgagctcagataatgcagagtacagcagagagctttaaaaaaaattgttattgtaagttcattgggactgcagagaatgatacatccataaaataagaataggctgctagaatggcgtgaacccgggaagcggagcttgccgtgagccgagattgcgccactgcagtccgcagtccggcctgggcgacagagcgagactccgtctccaaaaaaaaaaaaaaaaaaaaaaaaaaaaaagaataggctgctatgaacaggagtagtcagagaataagaaacaatgcttaacaattaaaattgtgatactgtagtacagaattaaataaactgatggacacaaactaagctggtcctctggaagaaaaagtagagcaaacctttatagcttataataaaaaaagacattaaaaatatgaaagcaaagtaggtgaaatggtgaattgacttagaataatcaacagccttctaatggagcttcaaaattattataaaaatgagagatattagaggacaggaaagaatagaaaaccatttcatatgagtctcggggttgatataacccactagaattgatcagaatgagtgggcaaaaggacccacacctaaatatatcttggtggaatctcagaacacctagaatacagaaaaaaaaaaaatcttaaagcgttccagaaagaaaagagttccaggccagacactgtggctcacgcctgcaatctcaacgcttgggaggtcgagacaggtggatcacaggagtttcagaccaggctggccaaggtggtgaaaccctgtctctactaaacatacaaaagaaaaagtagccaggtgtagtggcacagacctgtaatcccaactacttggaaggctgaggcaggagaatcgcttgaacctggaaggtagaggttgcagtgagccaagattgtgcgagactctgactcaaaaaaaagagttccagaaagagtaaatcggctatcttacaagggaactaaaatcaattcttagcatcaatcccaattagtagacgtaaacgaggtaatgtcttcttcctcgtttggaagcggatttattttggatcaaaaattctatacctagacgttttcagacatgaactcagaaattctattcccgtcatattccttatgaaaaaaaagttacttgaataaattctcaaacagaaaagtacgcaatatgaggtataaataggatatgatagcagagatgaaatcgtagaagttatacaagctgagagaaagtttttaaaaatcgctgctttgggaaaatctactttaagctgcagggttaagggattggcgtgtctttctctggggcagccataatcacaactttatagctacattttagagggtttaaatttttaatgttagacaagaatggcaagcttaattattgctacataacagattgtaaatgttgaaaatcgcaataatgtaaaggtaacgaaacaaactaaaattagaagtttaagagggagaaagttgaatggtagtgtaagtatgctaaatgtttagtttttatttcgtggaatcaactgctattttctgtaattcgtaaatcaaaaacataaaaataagtatcctatttaaatttaaaatggaagccaccagaggaattaaagaggcagaggctttcaaaagaatttttctctgcaaattgaaaagaattgactagtagggaaatttttgtcattttagaccatgttgaatggtttgcattattttcttaccttgttacaaatgttatttaattttttgttgcttcttctttgaaagaaagatgtccataataaaaatgtcatgcataatattccaattaggtaaactatgggtgactgtatagataggcatagagacatgtaaaagggtgttcatcacaatattaatgatggttattttaggtggtatgaaaggtgtattttattctcttctcagtatggtttgaatgttttacagtaaatatgcattatttaagcaagaaaaagtaaaccaatatgtgttgagaagaaaagttatactagtgaagtagcaggacttttgagaaagaaagccattattttgaccttaccagtcccttaaaaatctaatttcttttcctgcaaggaactaatactactagcctagtattttatggtttactattattaacaggttttagtgtttaacatgaaatgcaatgaaagttacactgaaactttgtcttgtgttcctttatgagctacaataataaagacttctcactctgtcgcccaggctggagtgcagtggcgcaatctcggcttactgcaacctccgcctccctggttcaagcaattcttctgcttcagcttcccgagtagctggaattatagttgcccatcaccacacccagctaatttttgtatctttagtagagacagggttttaccatgttgcccaggctggtctcaaactcctcacctcaagtgatccacccaccttggccttccaaagtgctgggattataggtgtgagctaccatgcctggcccaagacttcttttcttttcttttttttttttcttttccttttttttgagacagagtttcactcttgttgcccaggctggagtgcaatggcgcaaccctggctcactgcaacctctgcctccgggttcaagcgattctcctgcctcagcctgtctttacttaatacaacatctttccaactttttccccctaattcagagtggattttgcccatccaaaaaaaaaattacagcagcaacctttaatgcttattcttaaaagtacgtttcatctattgagagaaaattgcacacaagagcagtatgtggatgtttaattctgcatagatggcattattctgaattatctgagttatgtagtaggtatattgccacgttttcactttgggaatttcttaggacattataattagcagtttttagactttaatcattttagtcacttcaggagagatttaccttgaagattgcagaaacctgaatatagaaaggatagaccctctgtgactaatgcccttgccaacttgatagccatcattctcagtcatcattctcaggtgacaccaaaggcattaaagaatgttttaatgaaatattgaagtcttgtaactggttgtatttgtttttgtctggtgactttgattaggaaatatttttataagactcaacattctattttcgtttttgatgccttcttttccagatgataaagcctcttaattaggactcagcaaaccttttctgtaaaaagccgtatagtaaatactttaggctttggagcccataggatctctgttgcagctactcaactctgctgcgatagagtgaaagccaccatagacaacatgtaaatgaatgagtgttattacaataaaactgtagttataaaaacaggcccagaattgcctgccactcgccaagctcttctctttagccttctcaccaagaaagaaagaaaaagagagaaggagggaaagagagagagaaagaaagggtgaggagggggctttacttcttagagctatttgctcgttatattctctttcctctttcatgtgcacattttacatttgcagtcctaacttctttgttaaacactcactttgcaaccttttgaaacatggcctctgtccctctttatctactgaaatggctctttcattggtttctttgtcacaatgtgcaggggccttttctccttcttcatctcttgataaaaggaggcagaatattatggttaagaacttgggctctcaagtcagatgaccccagatgtaaatccaggctctactattccctgtgtgaacttatgttagtcacttactcacctctttaagcctcagttttttcatctgtttattggggatgatgatagtacccatctatgaaggtgatgtaaagagtaactgagataatgcttgaaaagtatttggcttcttaccagtaaacattaatgggttttttttggctgttatttttattatcacaattaccatcattattatggaccatctcatctttcttaaaactcagttcttagttcactggacaatgcaccattctgaatgtccttctgccactcttgtgtcttaccttctgctttctacacaactctttctcttttcatatccccaatgcaggattttttttcaaagctttgtatttagtgttcttttcctttggctatttgcttctattttaactctctcatttgtagatgactcctggatctaaccattcagtccctgtttctttccagagagtcctatcttcccaattatttttttcagcatctccaccactttggccttctgagatatcagtcattaagaccaaactcatccttttgaactcttgattttgccatttcactcagggacatcatcattcactgagggttgaacctttggagtcatcttgaactcttcatttgctttccccatccattacccactaaaccctgtccagtggctgcaaaagatacttcttttgtttttatttatactacgagctctcttgctaaggtctttttactaactaccttctacgtctttttttttttttaacaagaactacaagaactagttttttcattttatgtgtctcctcctgctttccacagcccatgttctttgtatcagggaagctgagccaccgtgaatgtttatggggtaagggatttctagagctcacaattgtggggaggagctggggaaatgacgctctgtgccttggacaccatgttcaacctcttagcctgcactggagtgctatactgtcctgccttaacccatcattccaatctgatctcccactgtaaggtgcctctgttcctaaccaggagataggagtcatagtgtctggatgtaccactgcttgggtttgttcttttgtttaacgatcccttctgtttttctcaatccgtacaaatctttcaggactcagctaaaaaaaaaaataaaagttatttttaacctcagctaggtgtgattcctcctttggataaaatttttttaaaagcttatatcattcatttatcattgaataaacagttgtagaagtctatgatatggcaggcactatcgtaagaaacagggattcagcagtgaagaaaataaaatgttcatgtccttgtggatattacattatgtagcactttatgtcctgtgttactgctaattgtgaatatttcttcccacttccaggtttttaagttgctggtggcaaggggtaacctttttcaagactgtagctcctctatgccaggtgtccagtttatttctcttgaatggaataaagaaaccaatgtggaaaatgataaaattttctatgaataagctgtttgctggaaataagaacagttgtatcaacttgtgagcaaccacagatggcatttattgctaatagttgtaattcttacccgtgggttcaatagcccagtatatctgaaaaagcctaggtagtcaccagcaagtgtgatatgagttagtggtgtgatgtagttgccaaagaagtcaatttgacttgtaccgtattaatgaaggtatactttctacagtaaggaagacgatagctctgttcatctcagctctgtgctttccagtccactcttagttacaatccatttcactaaggagacttcatgaggttctaggtggaagacagaatgcagaagtgacctacaggaaaggaggtcaaggactggagaactgtgtcagcgtaggcatgggaaaaggagctgggaatgttaaacctgaagaaaagaaggctaaggaagaaaaataagtgtatttaaatatgtgcaggactgtcactagaagagagcatatgattgtgcagagtgttctcaaggggaagatatgggacctgcaggaagggtgtaagaagacagattaagactcaaaaccttatctaggaatgacagggtacattttcttggaaggaattgagcttcataaactatggccgtcaacaacttttctgtattgctttagagaaactgaacactatagggttagggtgaagtagagaggttaaactaaacagccctaacacaaccatcttctatgaggtcttctaacggggtaacccaagagattatagcctttcagattgcatctcctttatttttcgtatttatgtacttgagagacgaattatgaactgataaaccccttgatttacttttttcaaaattttcaatctgtactctgtgtaatcattgcatgtcatcttaaatagtttaccttttctgagctttgagctctttcatggtaaaggatctaaatgtggtctgctgagctatgctcagaggaatcttggagacatgagattttatgtcttctttgaattgaagaacttaattttgattgttcttttgcatgacattttaaatgttctacttaaagaccatttttgttgagttcatgtaaatcctctccccttggtgaatgcttaagggcatacatttcaagtgtctctttgttctctcgtggtgattaaagataccaactttatagtgcctcatccacatgcctctcaaattagccttttgcagccccaaatgtatatcagtttctttcttagtgtgtggtttgtctcttgaaattaggcattcattcttggtaagatatgaattattaatgaccctttttgcttcaggaggcacagatcaatacaatagttagaagagttatgatttctatcaattaagattttaaaaaacttatagttagctctatgcagggcattgtgtaaatgcagaaagatatgattcctgcctacaatcagaggcaggaatcataactttcttgtcttagatttttagggattttaggcagagaatttgatgtgagaagcaatattcatacaacttctttttcctagggggatctcaagataataacgtatgtaacctcaatatattttacagcaataggagctgtttttattatacataaactttggcattactggccctttttcaacaataggtgcttgagtgctgttattttattgaattgtcttcataacacactaataaagaatgtgcggtagatattatgaacctgactttacaaagaaaaaggcaagagagatggcagtgctacagcaagtagacatgggctctgtaatcagacctgaagtcttcggaatagtgtgtaaagtctctatcattttgaaatttatgggggaagaagggcagactttagcttcctatcgttatgatatcaaataattcaaaatagagaagtgtgaatttaactaaaaaagaatattgtttgtctcctctgccaaatgaattatcagatggaagaggactcttgacatgtaaggcctttgaagaatgaatactttttttaagaacatgaaataaatagacaaccggcagctctaacgaaaatattggagacacttttaaaaccacactgtggttatctttttcttcagacttcttggcttccttcatgcttttttgtataagtacaaatatagaagaacataatcttaacctttctgaaatattttttgtctaccatagagatccaccatctcccattgggttttgtgtttatatccgtaaaacaattgagaatgatttaggtgcaattaaactggtaggggaggcatcttattgtaatagaaactagatgatattgacttcattactacctatgttaatataataaaacctcaatttgtttttgttttttggtggctcttaatttacaaagaaaaatacttgatgtaattgaatcgatttttaaaataccaatttttaagagatgttctggtttctatagtattgagaccaactggctgttgggcatcattttgtagtcattacaacagtctcagtgttgcacattttatttctctgtttcctcagtacctaactctatgtctaacacatagagggtgctcactaaaagttaatgaaggagttagtatctagcaaaatgtcactgagtgaggttctgaatcatcaagaagtgttcacttttgttctacgtgctgcatttcctaaggcaggaaagggaactgaaatgccttcaatttttttctggcattaaagttgccaaaggttacttgcatgaataaagtaaattaataattgcttacaagcagcattctcagtgactccagttagaagggtttgaggttttcatccttgtgcattctgtggtttgctgaagtttttttcatactccttcgttctgtgtttccttctatctgaatatcggctgggctgacttggatgcttgcctttttctggtttggagcagatgattgacagaatatgtgtgaaagtacaagatcatctcaactccttacgaaattgtgggggagacgctatccaggaagatttaaaatcagcagagcggctcatgcgtgatgctaagaactctaaaacggtgagtttcacttcaggctgtgtgagagtctggtataataaaaacgtttcataaaatttagttttagaaaccagtttcaactttctctctctacccaattccaagtttactaacaagtggcaaagtgaactgaattagccttgacctcctttctgtacctgtgctgattaccaataatcaagatatagaataaaaagcagagggccagtgtgattcacagagggtgtgattgggccctcaacaactgagagggagctgtcgtttaaatgagtaacagctcatttaaaatgattctgcttctaagctgataacatgaaactcccctctgttacccctaaaaggaagcttctctcacgttagactttggttcccaatgtgtgacttagtagagtaaggacttaactgtgagtcagaaaaactgggatctggttttggttctgctgctagaatcacacaatcactgaatgtcattagtatgaggaatctgtagatcaatcagatactcttgtgatacaataagagatgtatatttggtctttgttcccagttcctgatatggagcttctaaaaccttgtaatttcctgagtgatagggatgatagaagcatcttttgttatagtatttggtctttgtccctggttcctgaaccagagcttctaaaacccctgtaatttcctgagtgacagagatgataatagcatcttttgttattaataaaaagcccctctcatcacaccagagtttatcctaatgaggtgactcttcctgtgcccctagaaagttgcaggataggggaggttgccagaggaaccagccacgttattagtgaactgaatctgtcagcccaccccctggacgccatggaaatggagaggggctggagattgaatggacaccagtggccactgatttaatcagtcgtgtctatgtaatgggtcctccataaaatctctaaacagtaggcttcagagaacttttgggttgatgaactcatcaacgtgctgggagggctgtatacctgcagaactcccccgaagctcccctgaccccttacttcaccctatacatcttctgtttggctcctcctgagctgtatcttttataataaaccagtaatcataagtaaaatgcttggctgagttctgtaagtcattttagcaaattatggaacctgaaaaaggatttatgggaaccccttgaatttaaggcttattggttagaagtaccagtaacaacctgggacctgtgagtgccatctgaactggggatagtctggtgggactgagtccttcacttttgggatctcaggcaaactctgggtagacagtgtcagaattgaattgaatagatttgtaggacacccatttagtgtatgcagagaactggagacttgcctggtgtggcaaacacctacacttttggtgacagaagtgttgtgagtaaaagcagctcaactttcataccccagatgaagacattaagacatgaaggggagctgggcatggtggtatgtgcctgtaatcccagcttctcgggagactgagacaggagaatcgcttgaacccgggaggcggaggttgcagtgagctgagatcgcgccattgcactccagcctgggcaacaagagcgaaactccatctcaaaaaaaaaaaaaaaaaaaaaaaaaaagacatgaggaggtaatgtattattcctgtggtttcaaagctgcttaatgacagaagtggtcaatgtgaaagtctcctaatacccagtctagtgtttcttagggttgctgtgactcattgaataaaaaggaatgcccatagtctggacctcagtttattaatctgtgcaaagagcctttgactgagaagagattatccctaacagtattccttcacccttctcattcactctgcaatgactttgattgaaatatttacccaattctaaagaggttattttttatttctcttacagttgttaccaaatttataccatgttggtggtgcatcttgggcgggagccagtggcttactatccagtccaattcaggagaccctggaatcaatggctggagaagttacaagagtagtagatgaacaactaaaggtttgtggggtttgttatttgggaaatgaaattgttaatatttaactacgcatgatagcatttcattccatagctatctatgttttatagacttgtatgtgtgcatgctgcaaagatgtagtaaaaattgaatactgtgtcttttccagcttcattataagttttggaaagacttcttacataatcatttttgggtaaacctctaaatgtacctaataaattatgggttgccactgataaaggaatgattgatttctatttagggggtagaaagagaagtgtgcttctggaaaaaataccttctgttattaacatctgatttagagaatggggaaaatgatagtaactacatttacagtacctagatggtgcttatgtggggagtctgccactaggtaaatagataatcttcaaaggggctggttgaaagactaggaaaggtatttaaatgtaattacaaggcacccaaggttgcagagacctgcctatagattcactgaaaaaaaggtaagaaaagaaacaaaaagttattgaaacttttggggaatagagtaatctaagaccaacttttgcttaaagtaacttcaagaaacagctacactagataaatttcacattcagaaagttttcatcacttccaatctgcctatcaaggtagcctttaaaaactgtgtctgaatttctataattatttggcctgttttcttctgagaacacaattactacagcatgtagggatttgaaatgcaactcattaataactttgcagcatgttaattactctctttgaaaatttaagttaatgaaggagaaaatgtggggttttctttttaaggagtttaatcccctgtcttcctgtgcatataatacagagggactctgtgtatcatttttattttatttaatcacggttgttttgaatccatcctgagcagagacaaatgggcagaaaaaggactgtggatggtagagttctgctagaccatttgttacctaatagcacttgttttatcctgcatgaaggataacatatttaaaacaaaattggctttgttatttatttttaactgtagaaaatgacttactctttgtgaaatgtttaaacaatactaacatatagggaaaaaaagaaagtgaaaatcccgtgagatcccagaggtagtgtctctgttaatatcttagtgaatttctagacattctgtgcctatatacacagttttttatataagtgataatactatacatactgattggtaaccttgttctatttggtacaatgtcatgaatacaattataggttgatgaataatcatttttaatggctatgtggtattccattgcatagatgtaccagcataatttattttataatttctgattagttagggtaaatgtctataatttgacattgttatgtcaaatagtattagtcaaatagtattatactttcatatggattcacacactgctattcactagtgcgagcaattgctgattttgccacatcttcaacaatgctaagttgttcaaccttttaatatttttcaatgtaatgggaaaaaaattttcattgtgtctttttgtttgttttttgagatggtgtgtagctctgtcacccaggctggagtgcagtggcgtgatctcagctcactgtaacctctgcctcctgggttcaagctattctcctgtgtcagcctcccaagtagctgggactacaggtgccggccaccacacccggctaatttttgtatttttaatcgagatggggtttcaccatattggccaggctggtctcaaactcctgacgtcagctcaagtgatttgcttgcctttgcctcccaaagtgctgggattacaggcatgagccactgctcccggcctcattgtgtcttttggatttcttcaataactcagtgatgcatcaaataatttcattccccctttgtatttcttcttctgtaaattgtgtattcatatccgttgcctaatttgtttcattaaagtatttgtaagaacttattccatactgaaaattggctagaatttaaatgggcatgaaacatttgtaataggacctttcctatcaaacagcttcaaactgttaattgtcatttcagctggtctaaacgacaaaccaccacttatacctttggtgttcgtttccttctcattgcatggaattgttgaaatggattcttgccagtctctttcttaggaaagggcagaaggaaaatatccgaagtataacaatttgaattttttaaagcctaaaataatataaatatatttaggattcaaaatattttctgtaaataggcatttcctacattcttttgaccttgatttctctgacccctctttaaacatcaccagtgttctccattcatcatcgcctccttatttgcaaatatcatagcatgcttttctctcattctcactatttctaaggtcccaggcctccaaatggccttttccccaccttttcctgttccctactcacttgtttttattattctcaatccttctgagtttcaagtttcttttcctttggggatgtctggaatgaatcagagaaaatcctcaactaaaacgtcttaattaaatgtattttaaaatgttcttttaactgggtgcacatttcatttttgatacttataatggacttccttatatttccttccagtttacatgacaagtggacaaccttttactattaaaaaaaataccatttgtctatataaatttccaatgcattgattttcttaaaattatgtagggaaaatgtatttttaatataaccagtgttcagttttaaattaaactattgtggctgttactgaattcactactactatcaaattttcctagttaaaaattttcctttttctgtttcccacattctctaaaattaacatgttaaacttgcaagagctaaagtcgatggattatcttgtttaaatgttattttgtaaaaatagtttttattatagtgagtggtagaataagaaaaggaacctagcaggcctagatttgtgtcctgggcttcctgctaagcaagttgcttaacttttttggaccacatttccttctgcaagattatcttggcctcatgataatcagggggatttattccagctctaatatttgatcatactgtaccatggccagtcatagacattttgaacattgaataagttcaaatagctctttaagccatctttccaaagtattatttcagaaagcaaaataaatggccagataagccagccttcttagtatacttcctggaggagagaaaagcagtaagtctggagaaattccttctttgaaggggatgatgttttctctaaactggcctgttttagatatttcagaatgacaacactcccctgttttccctcttttgatcctaacattcattcctggagtagtagtagatgaacaagggggatttgaatgttttaacataaggaaacattcatttctcccttctggacttaaagtctagggtatttgtgttggcctaggaaattcttaatttcattcagggcttaaatggtaaaatacttgactggtaaatttcagctttacttatgatatgaggcctgaggggtttaggtggcattttgtcaactattaactcagtttggccagaagagttttctgagttttcttctttctagactttatattttccaaagcaaaagaaaggaagatttcagggcattttagtgtggaagttgtatttgcttgtaatgaattaaaagtcactggctcactgcaagattgtaagagcatagctgccatgttaaggatatgaatccaatttattttacagattttaaacaggtttcctaagtaccattagttatttttacaggtaagaaatatagaccctcataactgtcattagagatacatcaaaacaaaatcggattatcatatttcaaaaacagggcctgttcattgcaagttgtctgaaggtagtaaaacagagactaacaaaatgaagactatataagaaaagttaggaaatatggatagaatgagaaatttagcataaacctaatttagattttcccccaaaaagaaaacagagactaggggaaggcaacatttgaagagatgacagctgagaatttcagagatgaattaaaggccagaatcttctgatgcaggaagcccagtgaaatctaaagcaggatagataaaagcaaatttacatctagaatcgttgtaataaaaagtgaagagtgctgaagataaagatcttgaaaggaggccagagttggtggttgggggcaggcagggagaggctctttttttaaaaaaagaccgatattaacactgacagctcacttctcaatagttaatggaatccaaaagacaatgaaataatactttaaactttagagagtacataacatatcaatctagaattatatacccaatggacctagtttttacaaatgaagatgaaagcattttcatcactgcaaaaactgagatcatttactgttactagactacacacacacacacacacacacacacacacacacacacaccccaaacactaaaggatatactttaggacaaagaaaaattatccaaaaaatgtagtctgagctacaagaaagactaatgagctgggaaggtccaaatatgagtaaatagtagcattacatgaaacaatgacattaatgtctaacacgctataaaattttaaaaagcaagtactgaaagtgagtgtataagttagtagaaagttagttaaagcaatccaaggtcctagttttattctagagaagtgttaagaattcagcattagacctgtattgtccaatgtgttacacattaaccacatgtagccattaaaattacaattaaacaaaattcaaaattcagtttctcccttgcattatgtacatttcaagggatcagtagccacatgtggctaatgcctcccttattggacagctcagatattcctatcatctcaaagttctattggactgtgttgctttacacatgaagtaaaatatgcatgttaaaattcctagtataatcactgaaacagaggcactaaactagaagttacagtgcatttctagaagagcattaggaaatgttgggttatttttggtgtcatagtgactgacatgggcaggtaacagtgatcctaaatatcgtacaaggttgagttccaagccagaattgaatcccacccaaatggcaatagaagaggtatcaccagagagaaacaggtccgtgaataatgacaaatggtccagttttccagaaatatgtaagaatttgaagtgtgtgagcatctaatcatatggcttcatatataaatgaatgaataagtggacaaaattacaaagaaaaatggacaaatttgccattgtggtagagatcttttaaaataactgtccataattgatagatcaagtaaaacaatgatgaagaagatttgaacaacagaaatcttaattgtaatctaatgcagctattcaatcagtgcacaacaaaaggagaatgtgaaatttttttcaggtgtccatggaatatttatgaaaaatgcccatgaagccataaaggtcatctgcacaatttcagagaccgtattttctggtctcaattcaaataagttagaaattaataacaaaagataactaaaaaagagcccacatgtttataaatttaaaaattctaactcatgggtcaaagaggaggacataatttaaatcagaggatataaggaattaaacagtaatgtaaatagtaacataagaacctgtaggagacaactaaaccagtacttagggtgaaatacatgattttaaataccaatattggaagtgaggagagcctgaaaactaatgagctgttaatggataacttaagttagcagtaagggtcatgatgccaacaacatgctttcaggtgtttcagagaggggtgaaacaaatattgcaaattattagcaactggtgaattttaagagttaggtttatagatgcttattgtcctattttttccaattttttgtaggtctactttttttttaaataggggaaaatatttcctttaaagtcaggaataaggcaaagatgtttataatcatcacttctattcagctttatactgaaggtcttagccagtgcaatacgataaacaaaagaaatgagaaatgtaagaattaaaaacgaagaaaaattatcagaatttgcagattttatgatgtcctacctagaaaacccaaaagaatctgcaggtaagttattgaatttgtgtgataaggtttctagaggtagagcaatatgtaaaaagttaggccaggcacggtggctcacacctgtaatcccagcaccttgggaggctgaggctggaagatcttttgagccaaggagtttgagaccagcctggacaacacagtgagacctcatctctacaaaaattttaaaaattagctggacatggtggcccatacctgtagtcccagcaaggtgggagtgagctatgattgcaccactgcactccagcctgggtggcggaatgagatcccgtctcaacaacaacaacaacaaaaaaaaaaaaaaaaaaaaaattgtgtttctatatgtcagcaacaactagttagaaaatatcattaaaaatactcaccatttaaaatagtaacagagagcctggtatggtggctcacgtttgtaatcccagcactttgggaagctgaggcaggtggatcacctgaggtcaggagttcgagaccagcctggctaacatggcaaaaccccatctctactaaaaaaaatacaaaaaaagtagccagatgtggtggcaggtgcttgtaatcccagctactcaggaggctgaggcagaagaacagcttgaacccgggagatggaagttgcagagagccgagatcacggcaccactgcactccagcctgggtaacagagcgagactccatctcagaatattaataataataataaaatagtaaccgaaaaatctaaagtacctaggaaataaatcacacaaaaatctctaacacctcaatggagaaagtttattgagagactttaaggaaattctaaaataaaaatatgtgtcatatttgtgggtaggaaaagttattgttacagatgtcagtttttcctcaaatttatctgttatttgataattctaatagacattccaataggtttttaatagaacttgacaaagctgattctaaacatatggaaaagcagtgctcaaaaatagcccagacacatataaagaagaacaagaaggttggtagtcttgttctactgcatgttaagacttaggataattaggaaaatatgcagaggtagatgaaccaaaaaaacagatccaataaatagacccatacatatattcaaatgttagaaatgacagaagtagcactgaagtttagtacagaaaaaatggactatacccgtacttagtgagtccttgggcctgtaatactttttaatatgttccttagtgattgttttcagaagtgtgccaggccctggggatgtaagatgggacttcacaattgccaccaggttataactttgtatctggagtctgatggctctagctctctgtgaagttccagaattctattaaaattgcatataaatttttctggatgagtgttcatcagattctcaaaggcgtgtcttggcccaaaaatgggtaaaagtcactaacttcttgagcattttattttattttttatcactgaggttccgactgtatggcagcaggaaagagtgcatgtcatcaaatacagcttggagtgtgaagagagtaggggaagaaagaaagtcttctcaaagaaaaatattgagctgagtgtagaggagtacagatgttttattctggcccagaggggaaaatggaggaatctaggccaagaaaacattgtgtgcaaagcatggaaacagagcctggatcatacggggaactgcaaccatgattggattatgaatagttataaaggaaatagagagatatggcaagaaatgaagctggcaagctcagcatctaccagatacttcagggatttttattctgtgctaaagaataataattttgacatatttccacttttgaggaaatatctaggaataaatttagcatgttttggagatagttgtggtggaaggggttgaggtaggtagagtctagtgagacttgcaaatttctcacctagtttaataccattcttcacagtaaagaacttagcaagaaaggctgattttgctgttgtagttgttattgtttgagtggggaggggaggacaatactttgcagttgacctttccatggcatatattcaggcggaaaagtttcctaggctttattgtgtatatgttttatcatatgtattgtataggtgattgtagataaatatttggttgagactcactggaataacagtttgaagccacgggaaggatggatgttgaacaggctctggtgtgcagaggtccatgggggcatgaaggagaggctgcagtcctctcttatctttctcccagccctgccactgcaaagtttaccctggcagccctagatactgtttatttaagagaacaagggaacaaacttataagtaatgaagcagagacggaaggcacattcttttggatactgatcagggccattaaatgaggatgggtataataggaaacaagagtaggaaacagaagacctgagtgcccatctcaccaactccagtgaccagctgagcaaccttgagcaagtcacttatgtcctgtgagccccagttccctcatctaaagtctatcttcacctacagagttgtcatgtggatgaaaggaaaccctggatgaagttacttttaaagtgctgtattgtactgttgggatagaggtggtggtaaggaactaactgcagaatatttgctggattagttaaatgcctaagacaggctaaaattcgtttttatagggtcaaagttatgtgatcatggagcagaaagagactttatataattttatagatgaaaatgcagagatccgcaaagattattcacttaatactactcacttaacattccacagaaatttcatgtcagagtttacattggaagccaggcttcctccctttaggtgtgaagttcattcaaactgaattagcactgtcatgcagggagacctttcagaaagtaactgatatgttgaagaacatgacagaattaaaacagagtattggattcctgaggttgtttgtatcaggagtgccggactattactccatctagaacaaaatgtgtttatctcagtgtcaaagaggagactaatttgccttagactgacttacttgcatctcttgcagatgattggtataggagctttcttgaaaaatatactaattcagtgattattcaaccagagttataatggggacagagcactgtcaaaataggaaaggcttttggaaacttctcaaacggctgcctccctcctctcttcccctggttttccacattatccttgtaaacagcctgctactctgctgctcacactgcagtgcaatgagaaattttattggtggattgtgctttgcattttaatatgtgagcagatagaccactgtaccagtcttttgataacagtgcttcattggtcctaattcacagtggaccagtaataggatccaagccttgctttcaaaaactgcgtttcttatcattaagaacagtcttcgaaatcagattaataataatgtctgtgatgtattgagcttttaatatctgtgatatactgagctcttactgtgtgctagacactctgtggaacacattagacatgtaatattatttattctcaataatcctatgaggtgagaacgtttttattgtcattttatggtcaaggaaagtcaaatggagagatcagtaactttgtccagtgtcactcagctagatttcaaatttaggtctgacactgatgctgatgccctttccacactttccaaccgtatcacccatctcagacaaatcatttaacttcccttagctcacattcttcaaccgtaaaatggtgatcacatgaatagctgccctacccatcttcacagatgttggaaggataaaatgtgcagaaacatttttcaaactctaaagtgctatatgaatgtcttttgagtgttactattaatgctgtctataaggtgctattaatgtttttgtctgttattttcctatagtttattgctgtcataataattaatatcttacctaaagcttttcttttaaaagagtaaaattggcagtagtttctgtgatttttctgctactgctgttttgatagagcaattgaatggttcaccctaatttggagtttctgtgatttgcagaatctcagaagcattcaaatatgatatattttctagggttacctgtgactttgtgttctagtaccagggaaaacaagttcttgtggtaagggggtgtataaaggcttgatgtttgcattttttaatcttctcgttaatggctttgtgttaagtacagctgacacgccataacacttcagatgccagcatgaagcttgcttggttctgccaagtgtctgatttaaagtgattaccagagatcaatgatcatccaacagtcacaagtcaccctggggcagctcagaattcttggttgcgctctgggactccgtcgtgctcctgttctctgagggctccgtgtcatatataaccacctttcagttttatggcgggcacctcgggtgcagtgtcatcatctcttcccttcacttgtgctgcattgcaggcgttgcttgagtccatggttgatgctgctgagaatctttgtcccaatgtgatgaaaaaagcccacattcgacaagacttgattcatgccagcaccgaaaagatttctattccacgtacctttgttaaaaatgtcctgttggagcagtctggaattgatatccttaacaaaattaggtaggtttataatgttaataaacctaggagctgcagtttctgtaaatgcagtcgaggcagctgtaaagagggttattgttggctgtatccatatataatgtgtttaggcatgtttaataggcagaaactgtatataaatataactgtgcataaatgcataagttttatacatttccaaaatgagatgatcacgtaaatgcctgcattacttaaggacatagaattatctgctctgtttaaaggttttatatttaagagagggtacatgtttgtaatccctgttttctgtttctgaagtttatctttcacctttacagatcactagcttgaagattgagatcagtttgctttttaccgtcatacactgtgaacaaatgcacagcctctaaatagggagaggcccactttgaccttcccatattttccttctgggttattttggtgggtctgtaatactatatgtgtattaatggtgtctttgcagtgtttacctagatttctgtttgaaaaagtttgaaaaatatgacaagatgtaaatatttagaagccgtgattactggcaaacttttctgaatttttatgtagagactcttggtccatcaacagtattacattatagctcagctaattctcataatgtttcttagttggggaatcagataactaaaaactaagttcagaagcattttttaattttccattttaaccatttttgaatattgataaagatatttagatgtagcagaaataatagctcctgtctatagagctgggggcggtgctaacacacaatgatacagctaaatgacaatccatgagaaaaacgagcgaaaaacaaaatgagccccaaattatattatcgttaactagatatcaaaggctgatgactctaaatccagattatagaactttgaggatttagaaattctgcagtaactgaataatctcaggtcttttttgtttgtttgtttgtttgttttgttttactgaagcccctaaatcctactcagctgaattgtaaggcaattggaaggacttgagaaattttagagaagacttctagagggtttataggaccccatagattagtgactttataaactctagcccttcactaggtgtgcttacttattcttataacctgtggtttgagaatttttttgttggagatgcctaaacattaaggagaaaataatgtattggccactattctttcataatagtggtttcagccacaaatagatcatattttgatagctttgagtatcaaattctgtcaaatatgatcatttcctttgaaaatgggcaaattctgaaagttgaacagcagtatagaatacacatcaatgaatcaattttatgtccattaactccatacttggctttttataatgcattatactgaacattgatagaatgaaaatatttacacctacacatgcatgtatgtatacattcatataatatgcacatttgcatgggcaggttaagttgactgttttcctctaaaacctttgcaaactggaagcttaaccaggaaggaagcatagtatccggtagcaaaatgatagaatgatcctgagatattaaaaaataattgcgtttttaagactctatctttttttggtgctacaatttgaaatagatgaaccactcctccccactttcagagagaaggagagaaagagaaactattgaacctatagttttatgaggaagtataatttctaaacatgcctaaaaagaatcagaggaagtacttaaaattagattttcaggtccctctgaaagtttggggtgggacccaataacctgtatttttaatatgagacctgggtgaatcttatcagtagacacctctggggaatagtaaagtatcagataaagcaaatagatagtgataccttgtttcatgggcagaaattaaatgtatttttttatctttagcttaagataatttttactctaagtaaaaaactagtacttctattcagaaatctccccaggcagagaaatctccatgcaaattattgcctttaggttagcaagattttttccatgttacatgaatatattttcaacgttagcttatgcgacaatattggaatataggtatgtatttctctcacgtatttacctttaaatgtattgtgcttaatgtacatttgtacatatatccattaagatattcagaccgagaacacacatgaaagtggaattcttgggaataccaaatttgcaaaaatgcaaacaaaaataccagccatctgacagaatcttagtggctgggtctgtttattagtaaaaacaacaagccactttttgctgtgtggacaactctctgaggtcaggcaacaggcaccagaactgcaaattttagtaacctctcttcataaaagataggggcaggtgattttgtaaatagtcaaagtaagatggtcagtcaaagcagacgcagttatggtatcatttgattggtgaaaagttttttaaaagggtgagtgatacgcatactaaagcagtaactaagacttaacaaccaggctagactttcttaatttactccagcccaggtttgttttcctttatgtcaatggatgaattgttcctcaccacatggtacatatggttcccattaactttgtctttatccagacgtttttcatttctaccattaaatcttgagttttgaaattgcagaggcaggttgaaattggtaaagaaagtctattacttgtgtgtttatggcagtgtttaaggtttatttttggaaatccttagtcctgttcacacattcttatattccactttcaaagacagaaatggaatcacagttgaccttatcactatagcagcaagggtggatcattttcccctcttgcacaaattaaaatggtactctgtccttttgattttcacacagtgaagtaaaattgacagtggcctcgttcctgtctgatagaattgtggatgaaatcctggatgcactctcacattgccatcataaactggtgagtgctgtgcacatcttgagcaggacctcctgtttcagctctgctgtgatgcaggatgacttccggtgtggggatgtgatttcttttctgtatttcacactattacagctttatggtttgtgatcttggttttcctcctttctcttctatgttgcttctagccattctggagcatgttagaacttctccagagggaatgataagggaaagcagaactgattgtatccagaaatcttattgttcatttattataaaggtcaaaagcttggggaagaaatgttgagactgaagtctgaaattaacattttaatttatctttgctcattttgttgttgatatgattatttgataatggactattctaaaaacatgggagaaaataaaaatatttgaataaagaaagtgcaagaacaaaatgggcataatttagtaatggatagctgctgactgccccacaggtgccttggatataaccaaggtaaaaaaaaaatttcttcatctagagactggttctgcctcaaggtaggggattttacttccaatatcagtgcatatgaaaaaatgtatcagaaactcaatgttgcgcaaacttcaggaagttctctgaggtacagatgaagcttttataactggttatatctaatgcctcaatatgatgcagtggaagtctcccaggaaagttatagcaatgtttccttcaagaaaaataattcttcaatgttttcttaactgtgcgggatggagataccagttttatggcattgaattgttgggtgaccctagagaatcctaaaatgagaggagcagcaatagcttcttctgcgtgaaacagacaaaatgcatgtttttgaaaaattcatttgagaaaaacgtgtaagactgtcttccaaaatctgaaagacaagacagatatctctaatagcacaattcaaatgctgcctgtggaccagaggtggcccactaatggatggttccccagaggaagcatccagaaacttcttgagcttccaatatcagtgcatatgaaaaaatatagtttttcattgtagcaccaaaaaagatagagtatccaaacacatgttatctttctgatttttcttttttattgtattttaacagtgtattggtttgtgctaaattggaaatataaaaaaccagtttatcaccacattgaatgtaagaaacactgttttctatttcctggcacagtaaagagctacatgattgtttagagctcctgattcagcctttttttaaataagtacaaacaaaagcaatagagtattcattcattcattcattcattcattcattcattcaggatggagtcttgctctgtcactcaggccagagtgcagtggtgcgatcttggctcactgcaacctctgcccctaggttcaagtgattctcctgactcagcctcccgagtagctgggattacaggtgtgtgccaccacacctggctaatttttgtattttaagtagagatgaggtttcaccatgtgaaatcctttctcagtctcctgacctcaagtgatccacctgcctcagcctcccaaagtgctgggattacaggtataagccactgcacctggcctagagcatccttttaaaataaacttattttagaaacagtttattgataacccatggctccaggaatggccttaaaatgcttacttatgacacaaatagtacatattatactaacagaaatcttcatgtgagaactacactgaaagtttgaatttttcacttttttgcatttgttttttcttaaagaatttactcagaaagtattgatttttttaattgcgaaaaaatttgctgaatgcacttttggtttgaacttcattttaacattaatactgctgatttagattataaggaaagagattaagtctcatatgaaggaaatactgtcttcaaaatgaaaccttggtttcaatgactttcagataccattttcaccaacttaagtttgtaaacgttctcaaagtttccgtggacttgccaactggttttcattgtttcagaagaattaaatcaaagttcctggtgtcagatcagctcagcactgaagtttgttaatttcagccaagcttattctacctcttatttaattttttatgtttacctaaagtataacactggaaattaagaaatcatatcaaatatggtattcattatatgaaaacaatgaaagcgagcaggaattaaaattttgctagtaatttccttcttttcagtcctttaaaaataatgaaagttggaattgttttattactctcagatactttttagtatagaaggaaatttcttcagaggaattatcaaataaaattaataaaaagaacactactatgttgtctcttcatttactaagagatttataacttattgcttaaaacactctgtcctccaaagaaagataataaaaggaggtaagttactgtactgtgaatgtattaagaattgtccttgtcactcgtcagctttgtgctccactgcgccatcttgtggaagacgtcttcaggaatcctgctaaccagcactttctctgtactttaatttctcctcgtacacgtcttgaccttctaggctgaccatttcagcagacgtggcaagacccttcctcaacaagaatccttagagatcgagctggctgaggagaagccagttaaacgttccatcatcacagtggaggagctaacagagatagagcgtttggaagatctggatacctgtatggtaagacacatcctctggtggtaccgttacccttttcactggactgtgccattgtttttttttttttttttaaatctcaccttttgaaatcagaccaaacaaaacactgtccccaccctcagacaattctttcagaaaagtcctaaagaggccgctaatgaagtgaataaagctgaagcttcagcccccttctaaggccctgtagccatagtgggaaaattcctaattaggagaaatagattaggtaactcttaaaggtttttgtgacaggaaaatatcttcaaataaaattataaataagccattaaaaatgtggagaaagactttttcaaataaaaaatatatatagggtgactctttcttggtcttacctgttttcttttgttacacaactttttgacaaacccttaaatttgggcttcctgtttagatgagattctgtttcgttaacctgatttgatgtgctttagaagatggaatgcacactataatgtttacctaactgtaggtcttaatttcttatccattttctaaatttcatgtagcatatccatctggccctataactagagtatttaggttgttaataccttttcactctaaggaaaattttatctgaatcctatttcattattttaaaatttatattaatcagcatagctacttctcactttaccatgaaacaattgtttgtgtctatatcatcctctgtattcaatatgtttatgtcttacaaaatgtttactttttaataattccttataatctgaggtggtggtggtaagactaggttttggttacttatatgtccaaatgtttctacattagcttgtgattttagtaatttttagatgaagccattgttaagaaatagtacttgttttaactttgaacaccaaggatctgatatggccgatattacttttctaacctaggagggaatgtagtgtgttaagaagtttacttatttataaaccactgttatcatgttttaaagtctgtgaataaaatatttgagggttctctatgtaaagtcctgtcctatacaaggagaacagcaaagaaagcctaatgtataatccaagattgtaagcaacattctaatatcactaaataaggctgaaaaacagttttctatataattatataaacctgcacatatatttaatctgggtggaggaaattgtcaagtttttaaaaacttggttgtccatcttattataacatttatatttcataagtattttgagtttgtttgccttttgaggcattagaagttggacactatgttataggataattgttctggaaagctcttagactagccctaaaagaaaacaaataataagaaatagatttgaattaaaaatttgaaatcaactccacataccacgtttcctaccagatttatttggtcatgtgtaaattggaaaagggtgaaggaaaaaacaagctagtaaaatgtattttattaggtttatagatgatgtggtttggaatgaggaaaagttggttatgaaagactggctcacctactgtaacgttggttttaaactgtgtaaactttgtttggaagtaagtttttttgtttgtttaatttggtttagttttgtgaaaggaagaaaaaggttgtttgtttgttttaagtgagtgagttgagggtggaggaaaggaataattttaaaaaatgcagttggaagaccaccctcagaacttaagggacaggcctgcagcaggcacagcccctgtgagtcagcatccattgtaaaaacattcatgttgccatgatgcctaaagaggcaggagtagatgtagatctctttgaattcaactctcaggacaagccacgttaggagggtagactttatctggtttaaagggccaaggaggtaagcagggagggccattcctgagatgagcctgtgttgagtcctagggtgaggagcagggccctgggtgttgagggagtgacagagaaacacaagagctcttcatcaaaaaaagaatatataggtaggcatgagtttttaagtcatgaaagcagcttttgttctaataaatattgtcttcattcattgttctaactaggctaataagttgttaagtagtagaaaaccagagttaaatttgctgttagtgtaatgaaaaagcatatttttgtgtgtgtaaaaagtgcaagtcgggattttatactattgataataatttcgtgtatactttcagcctaaccatcaattccaagccacccaaagatagaacctttcacatggcagcagctgcccgaagtgcaaggatccctctcctaaaggaaatcgattttctgagctggtacaaactcatagctaatttggaaggagtagagcaatagattgctcttttaatgcctcctttcataatcaaagtagcaaaccattattgtttgttattgacatctattaccagatatttcaagctgtgaccctcatacgatgccattgggggaaaaaagtttgcagtccatatttcaaagggaggtgcatttaattcgtgatggttttctaaatgagtgtatgcattttccttggcagcatttctatcttaagtgatccggaaagttaggactcaagattaactgttgtgtagaaaactatcagaagggcaagtacataagtacatgcacgcaacctttccctcatggaattaaaaacccctggtgggtagaatttgtgccacagatggagcttacagcactgttgaatttgattgctttgggagatgttgtaattttactattaccaaaaatgtttgtttatagcccaaagaacggtgaaactttccctatgaattccaaaggaactttgacacatcaccaacctgctattcacagatttaagtttgttcacagatcctggcattttttgtgcaggatgttcatagctactaaacccatttttgagcatttctttaggaaactgggcagagattctgggaacccttttgtcccctgcccctggatttctagtcttcatgttttcttccatttctctctggtccaaatgtcaattccatttcagtgcttaagtctctttaaaaaaccaacagttataattgcactaggggaggtttaagggcatgttatgtgtagaaatttatattaatttgaattttaatgtttaccttcctggagttggaaacgataatccatacgattgatttctttgaaagaaattcatcacttagtcaacaacaattaaacttttgttttgactaagcgaaggctgaagtaagaatgatttgagtgatttcttgggacctgttatctgctggaggataactaagcttctaatcaaacttaattttataaagttaaagaaaaaggcagttctttttaaacagagtgtcagaaaagggaattttgtttgtttcccataagataaatgatctttttcttttaacgagaagaaactaagaggtaatctagttcaggtggtaggacacagtggggaggaagataacacaaactattaaaatcacctgcactgttttacagcctgtgtctactctcttagcccccgagagtctgacatctccttaactgcagggcggaaaattaaatggtttaaaaagccttcttattcatgtgcttaacacttatgtagtacctgtgacgttcaggcactattctgagctctttgtgactgttaaccagttcaatcttcatagcaacctgaataataaggtcttattaataccttctgtttaacaaatgaggaaactgagggagagaaaagtaaagtaagtaacccaaggttaaccaaaggcaggcagtttggtgccagagtctgcatttaactagtctgctataatgagtatatggatttcatctatggtatttcttacaaaaggattaaaatttgcattcaatttagttataccacattgatttctgtaaaataggtgcttactagccccagatgaaatgaacatgtgaacagaaacacaaatagaaggcgtagtgtaatataaccataatggtagcctgtagtttttaaacattgttggaaacgtgtgtcaaatatctgctgtgttcagttgttatccaattgttagaaatgaagttgcccacttttggcttacctgaaacctcctgtgcctctctatatgttattttgttggtgacaatgattaattagttttcctatatgcttcttatcatttcaacccacatgccttatatgtcatgctgaaacgtgtatttctttagaatctttattgttcacagaccatctgttcttctgcagttgggtgctcttaggaaatcagtattctgaaccatatctttgaactttggtgtcttactggtccttggggtattgaaggatgcagttttagttctactgattagttatctctaaatatttaatttgtcaccatatatagtataccatctttaaaaaatagcagaagtttgggatttaagtagtatgccaagtgagtgaagagccagtgtctgctccttaggcataactagctcactaattgtatgtaattctttcaattattttaatgagcgtcataccagttttaaatcaaaagatattcatgcagaggagcagtttgtccgcttattgctgttcctaggaaaagaatcttaaaaagcttgaattattacagaacgcatctttgtgaatcctgtctccaatgataaaatagcaattattttcccttaacaaattcaacttcaaatttcagtatatattttttaagtttttaaatacagactaaaattcagcaaaagtctatttgacttggtcaaaatactatttttgagaagaaatttaaacaaatggccttattctcaagtaccaacagttattaatggaactaatctattcacagggtcgccaagcacagactattgagtcaatatgtctcatctaaaatggtttacactaatattaactatgtgaagagggttgttcaaatcataattgttaattttctcataattttattctgtaatgtctttttcttactgatattacttttgaaaacagagttaactttttaactagtagaaagcaattgattaaaacacctttatttccaaattctaagtttcaaaattacactctgagtccaacgaaaatggttaatgtgtgttcctcaaaatttgtaatagtatttttttattttttattttattattactattatttctttcctcagagatccttgttctgatgtaataatatttgttacagtcctttgtcaaaatgccgggaatgcatgtcccatccctgaagagttcattgttgcctcaagacccagagttactcttttaatttttaaatcacatgaataccactatcagaggccctattccagggagcttccagagatctgacccagatatctttttttttttttttctttgagacggagtcttgctctgtcgcccaggctagagtgcagtggcatgatctcggctcactgcagactctgcctccctggttcaagcaattgtcctgcctcagcctcctgagtagctgggattacaggcgcctgccaccgcgcctggctaatttttgtattttttagtagagatggggtttcaccatcttggccagtctggtcttgaactcctgacctcatgatccacctgccttggcctcccaaagtgctgggattacaggcatgagccaccgcacccggccagacatcttttttaaaggattaaaacaaggcctaaggtacagtgttgactgccctcacaggctacccaagagacaaaagatttccctcttattgcagttatttctagaaagagatgaatcctacacctttgccctgcaggtaacagagcaggcttcacctcccagagccctaaagctcccagtaggagctaaactcctaagggagaagatggggcatactaaataaatccctccacaaaatgacttcaaacatgaaccaattgtgactagtcagggcattccaaaaccagcacccaaattgggcacctgacttgttgattggaaatggtgattcttatgagcttaattttgacatgtaattatcattataaaaggtaattttgtaatcataaactaaacatgaactatattaaatgtctctagtaacctgcagatttataaaacagaaaccattccattttctgtgtgtgtgcatatgacataggaatatacttaaggaggaaaaattgcaagtgaattttaattttaactgagtctaaatgaattaagttatttacaagcagtcacagatttaatggctcctgggtatagtacagtagagccaatagtaagtgaaataatttctctaaactcagtcttacttttcctcccttagaaacctcatgcttttcaacatgccatgatgacatttgcatcaacgacgtttcgtttatgtcaaaaaagctccaaattatcactgctttccagttagaataaaagatcaaatccctttgggatgaaaggtttcctctttaatttctgagttaaacaatattcaaattggagaaaacaatgtttttaaatactaaggatgtaattcttgtctgtatatatgtatgtgagagaacctgcctaaagaggaagacaatgggaagtccttaaagaggacttgtttacccaggtgatggggtaaaagaaacatctggaagaaggtggctgctggctctcaacagagcccagaggaggaggcagttgtacttgatgttgaagtcttaggtagcgatgagctatcagaagatcccttaagccatgcataggctagatggccattcattttttcaacaaatgcttattgtccatccatcatataccaggtattcttggcttcttgctaggaatggaaggtgaaagaaccattgtatcacccaccaggcttgctacattgaggggaagaagtggcaaggtagttttggtggatcacagaaccaccgtctgtgtaaatcacttgaatttgcttggatgctggaagctatgaatctaccactgaaatgaggtcatcaagaaaggcttaaattcatacaggttacatctttcaaacctttggtaacaacccactagtgagtcatgaaatcagtataatggttgcaaccaggattaaaaaaaatgatctgacataaagtatgaatatattttgtatcatattaagtatcataagtaacatattatacaaaatgtatccataagtatcatattacaccaaatgtttgtttcagttatacatacatgcatgtgtaaattggggtgtgacataataacatatatgtcttaggaataggtcacagtcaaaaaagtttgagaaactttcatctataataactctctctacctggtgtgtttcaactttctcaaaatattagccacacagcagctcatgcatgatcttattatttctccactgcactgtccaggtcaggaaagggcctgagcagagatgcaggagtagaagaggatttggtaccctggagagcctcttctaaataggctcattgtttgtttcattgttttgagctcccatggaatcatttttactgaagagtgcttttgccttatgttgttgatcttcattgaggaccactttaataaatatccctatgaaatttgttaccatatgtactctttatactgtctataccactattattgtcactctgttttatcttaaagtgcaattgttacagatacatccaggtgagattgcaggcaagagtagtggacgttctgagtagtttgccttctgtcttatggacacgatggattgtgccatgtgtctcactttggtattgttaactgagaggctcagaactgaatgtgcatttgacctataaaaagtgtgcagtacctgaagaagtgtagtttgttgtattaagctgtaattctggcttcatttttttcttcattgtctttactcattaaaaaaaaaatattgctgttacatatgggcctcagctcattttcagactgaggtggttatacattagtaaagtgaaaaattagatatggtgggaaagtgctctggtaaaggtaggcaggttgctatggaagcacagagaagtggtgtccagcccagcctgggggaggggtgttgttaaggaaggcttcctggaggaaggttctatgcatcatgcctggcacatactaggccctcagtagctgctgttacaatgagagatggcatgagaaagagaagtttgctggaaggaaaatgagtaagtaaatttagtagggagagtggcacatatagagctctggagtgaagacagaacagtgcaatttgaggaactagtataaattgaggaacccaatttggggaggctggaagggaaggcatgagccttatcacccagaaccttgtagatctcacttaagggtttgtttgtcatttatttgtttatttttaaggtagcaagcagccaccaaaggtgaggaagctgtaagatgggctaggtttttgcagaaacagtggtgacttctgttttgttcatcaagattgaggtactcacaaggccctggttgtgatgtccaggagtagctctggggctcagtagtcaagtctgaataaggagtcatccatgcccaagtaaagccacagtacaggtacgctcaccagactgccttccctgaagtgatcattgcctctttagttctatcagcattgttcttttttcacattcatgatatttatctcaatttaccttcagcggctaggtacagtggctcacgcctgtaatcctagcactttgggaggccgaggcgggcagatcatgaggtgaggagatcgagaccatcctggtcaacatggtgaaatcctgtctctactaaaaatacaaaaattagctgggcgtgatggcacgtgcctgtaatcccagctgctcaggaggctgaggcaggagaattgcttgaacccaggagttggaggttgcagtgagccgaaacagcctgcactccagcctggcgacagagtgagactccgtctcaaaaaaataaaaataaaaatttaccttcagctacaggtacatattttcagcttcctacttgacatctccaattagctgttcaaaaagtatctcatatatagtatgtcccaaatagaatcattgagttccccctttccctccctaaggcttcaccatcagctttgtgactttctatttctacccatttgttctgaactctacctgtcagcctcaatctctcttgttctttcactgtccaaatctgccttccctccctcatccaagacatgtttgattcttgtctggactcttgaaacaggcttgtacttcacacttctaccttcactgttgcttctgcagtcaatcgatcccctattcagtatccagaagagttttctaaatggaaatcagattggtatctaaggtgtcaaatcctctgatagcttcacattgtacccagaataaggttcatggtccataaagtcctacatggtctgccttctgtctctgtctcctaatcttactttagtctctcctttgttctcttccctccagccactggtgcttttcttgcttttccctagaacttgtccaggctcccatctcagctcttgttccttcaccttggaatattctccaccaacttgtcccatggctgtcttcgtgctgtttaggtcacaattccagtgtttctttctcagaagttgtccttgatcctctgagccaaagaagccttccagtcacctcgcatattatattatcttagcacttattagaacttgaagtgatcttacttacttgtgaaggtataagcttctggcaggccaggactttgtgctgttgaccacatatccccagtatctagagcagtgcctggcacaaaattgctaagtaaaattcatttccctcctcctggctttgaattataattacttgcatgggttttctttgtatgcttcttgaaagaactggaattacatgttattgatttctatatagctaatgccatcaataaatatcagtagtagcagattaatctgggagctatagaaaataattcttgcatgaaaaagttatctttaaactgatgaggttcaattaatgagaacattatagattaccaagctgtcagcaagttgctgaggagaaagagattaaaaccacccacccactgtaaccagtgctttgtcatagcagccaggtgtggtagctattttaacccatttttcagatgagactcttagaagtcagggatgttaacacactttcccccatcacattgcaataaggagtagctgcagctgaaagcccaactccacatgatctgactctcaaacacgttctctgtctgcagaattcatggtcttcaggctggcctgaatcccaggaaacaaagacccaggagaggtttgtggtgggaaagagcctttgcactgagggcttacactgagtgttcggtggatagtatctttattcccacgggccaattatttctttatagaggtttattattctcagtggaactgggggagatactaacctatggtagcaaatccatacctcctccaattatggggcaagcaatggcatggattgtagatgcctgaactgatggaaacagcagaaagatctggggtagaggactctgcccctggaagctgcccatacatataacacatgtgatccttccaaattcagcccttgtggttaatcaggctgtacttcttgccctaactttgaattggattgttttccttcttgcctgatagaatctcaggtttaaccaaatattctctgagattaaagactttctgaggagggaacaagtagggtagatttacttgggctgaaatttgggaatgacaaaaagaagtggcctaaatgtgggtggagggagaaagaaaactagtgcatgactccactccacattatgcttttggccatttaagattaggtcacagtagataaattaagtgattctgtctaaatttctaattgtactgttatagtttagaaacatcaattaaagttgggatgagttaagcttcattcttcagctcacatgtagacattcagagagtgaaatgggcctgtcaaattctcaggttccctaaatgtgcctcagaggaaacctctgtcactacaggaatttatatttaagatttcttccatctctcagggccgaggccaaacctctatcacaagcctatcctttaaaaaaatcaaaatataaaataaatggtttttagctttggcctttgacgtatgtgctgaagaaaatcacattgactttcattctgaaaaataacacttggaaactggaccaaaaaaattacttccatgctccaaatataactgcaaaggatttcttttataaattcttgtctagattatatagccttatataaatgtatttcttggatttgtatgtgtttctgacttatttgagaaactattttaggcagcagatttaataattaatagaaattaaaaaggtaaagtggggtgaacagagttaagaggaaagaaaacctgaaggagttgtaatacagcaaacttaaggatcagcgcccagcctaggaccacatggtgctctattctgcttgctggctaagggtggagccttaacctggaaactagtgctgcaagttttggatctaacatttgattatccaaattggggtatgtgatcatttctgttgtccagacagaagaccttctagccagagccgagctgtagggtgggtacctgcaaatcaagacagggtttttatctgaaagcagctgcaagtccacctcagcccttgagccaagtacttaatggaaatccccaaatgccaaactcaattcagcatggccaaaatgacttttttttctgaaaaagatttcagagcattctttatcatggccataaaaaccttagtaatgcttctagttgtgcactgtgtgacctcttccctctaggtaactgaatgaactggccacctgtatgtggttatttgatattgaaactttaaatgttggagaatgtcactggaagattcatatggggtttgttccagttaacattaaatcaaacaatagctaagagattgccctcattatgctctgaaagccagttttgttttgttagaaaataatgccctagtggcatataagtcatatgtttgatagaaaatgtacccaacttttcattataccttggctgtaaatcgataattcattttaaaatgagatcaaagccacaaaagattaaaagcagcaaataatattgcatatttttttgacagatgttctcataggtagaatagagtgtatgaatgatgatctgaagttatggaaaaataactatcaaaataattgatctgtaatttagagagtgatatcttgagaattcactcttttgagaatctctctttagaattcattcagtagggatgttgattaaaaggagttaaactgagcatgatgaaaatcttggtttccaagctggagcaggtttcagagttttggtgataagccgtctttccctgaagctctgtttgaggttgaagagttggggttttagggcctaatttcagtaaagcttggggaaccacttgctctgtggttaaaaagtataggaaccatgtcttctgattactgattgattaccacagctctataactaggatcctaagtcaccaggccccaaaatcaccctccactctttttacttggtacctctgtagtttatttgactcaagtttcttaaagcagtaaaataattgttatatttaacctggtttttgttggtggcagtgttgttgttaactactaatttttgtcatcattataaagctgatattccatgaagggagcaaatgtgttacctgaagaatttaggctaattttgattattcatcttgatgtcactgaactatgatgtccattctagaggaaagtatttaagtcttctcctaaactcctagtttttgcctttcattttaacatggattttccaagattgcgacttaaaatacctcaagtttaatactcagtagggttttcccctttgtttatgttttcacaataaagaaaatattaaaatgctattcaagtttttatgaccatcagattaacatcttgcttactactgcaataaagtaaataattttcccactttttttttttgagacggagtctcgctctgtggcccaggctggagtgcagtggcgctcactgcaagctccgcctcccgagttcacgccattctcctgcctcagcctccagagtacctgggactacaggcgcccgccaccaagcccagctaattttttgtatttttagtagagacggggtttcaccgtgttagccaggatggtctcgatctcctgagctcgtgatctgcccgcctcggcctcccaaagtgctgggattacaggcgtgagccactgcacctggcattttcccactttttaaaaatttataatgctacagggatatatacctgatcttgtagtaataaacatcatgcttctgtgcccaacaggagtcacacacattatggtggcaagatatttgcttgaaatcagtgccagagaattctatttttggactactcttaagaaaaatgtattaaattttatttgctttttaaggagaacattcaaacgtgaatttttacttttgcagcagttgcaagatgagttatgaggaataaaaagtgaggcatttcctgtttcctggagaaaatgtgacaaaggaagataaatattttgtatcaaaaaactgtgcagatctggaaaataagggaaacattttaatttcaaaatagttctctaccatgatcttttcaatagtctctcatcagtgccgttccctaagtgtttttgttttaacatcatgatgccagtttaacttttatgtgaaatgagactctggatataaaagttaatgagtgtagcgtgaatagctggatttaatgttgtgtttagtaggaaatgtggcacatcactaaatctctacatatcattcctccttttgtccattgatttattgcagctttctcagagttataacttccctataccttttcttcctaggcttgcaaaggaatactttatgctgtccaacaattgtcttagaaagaattaggtatctctttttcttagtgagatttacaccatctcagacttttaaaaatggaaatgcacaaaaattactttttgtaaactacaaatgtgataatactgtttggttagatattgagggtaaaagtcaattaaaaattactgagttttctcgttgagctgaaaatctagtagtaagtatttagtttttataatctagttcattaaacagggaaggtaggtctaggatattttatatcaaaaagcaatgattagctctaaattcaatgggatcatttcagagctcagaaaatccagttgaaagggcttcactgagacattctgagcaccaaaaagcataatgactagtaatttaagatacactgaagtattagagaaccatgcattcatagtaatactcagaaaacatcgaaatgccagtacagaggattgtaagagaggaaatgttctcttttcagaggaatggcacctaataaatataagaacaatgaaagaagtagaaagttataattttgcagttctgatcatatccattaattcaggcaaggattaccaatagttgcttaaaaatctacgtggactaaaagtatcacctcatagagttactattaattaccaagggaattaatactttacaattagtactttacaattagtactttacaatggagcacagctggaaagtccccatgctaatcaagggatcaaggtcagtcttaccagtagtggaacaacctgacatatgtgccaatcactgtgattcagtcagtagttcacagcatcccgtatgtggtattcatgctaaaaatgtttcactgaatctaatcatgaggaaaccatcagacaaatatagcatgtgaggcagtctgtgaaacaatcggcctggatttatcaagaaagtcactattatgaaaaagaaaggtggggatgggagtggggagggaggatgtgctaggtgaaagagcctgaagagacattaccctatataatgagtgcattctctattaagatcccgaaaggggaggggatgttttaaggcacttgagggacagttgggggaatttgaatatggactatagtgtgtatgttagatattatgcaattgctgttaattatcttagatgttgataataatgtatggttatataggaaaatatgattcttaggatattcatgcagaagtatttaagggagaaatgtcaagatgtcaacaacctttaaatggttcagaattttttttttctgtgtttgtgttagagataagaatgaaggaaataaagtaattttgtgtgacaaaatgttaacaattgctgaatctaagtgaagagtatatttgtatttattagactatacttgtccttttaattttgctaaatttgaatatgttcaaaataaatagttggagaaaaagggtgggtgtatgtatttgaaaagtgtattgttgaaggaggtggacatcatagctgggtgcagtggctcatgcctcatgcctgtaatcccagcactttagggggccaaggcaggaggattgcttgagctcaggaattggagaccagcctgggcaacaaggcaaaaccccgtctctacaaaaaatacaaaggttaaccaggcatggtggtacgtatctgtagtcccagctactcaggaggctgaagtgggaagatggcttaagcccaggaggcagaggttggacaatgagccaagattgagccactgcacttcagactaggtgatagagccagaccttgtctcaaaaaaaaaaaaaaaaaaaaaaaaaggtggacatcagtacatgaatcactagggtccatgaggaagtttttgtctgtgtaacaagaaatagaaaaaatacagacaccagatttttcatgaaaaataaatgtctctaaaggactattgtttataataaataagtctttactattttatctttgtgcctaaatgccctttttggtaacaatggttggtactagtaatattttctttttgaacaagtctatagaacctgaatgtggggagcgcattggattaaagcactgattcagttcattcattcaaacacacacttcttgaaggcccattatatgccaagccctctatgggctctggggatctagaagtgaacaagacagaatcctggcttatgtttttcacccaagagatgttcattttgtcttccccagggatgaccaaggggaggaggatggggaggggcacctaaaggaaatcctttgagccactctaggcattcccctatgtcacccaaattatcccatttatctatcatgtgtttttgacacattgcttaagatgtttcaaaaagtgttctgctgtctattacatgaaaaccattttcatttcattaaaatgaaaaaaattacttttcatgttaaaggatgctatagtaaatttcttggccattagataaaaagaattctctctgcctacacacctgtttctattctaaactcatttttaaaagtaaatatacttgacaaggtgactctgtagttgaaattcttgtaggttttctgcttttcttcccctggagactgagggaggactgatgagacagtggccaaaagacgcctctgccagttttttgccagcaataagaaaacggagggtttacctctaagcaaaaaaaaaaaaaaaaaaaaatccttttttgcttatttcttttttgcttagtggtaaaacccttcatttccttatttttttaactaactggcttttttccccttcacccagtctgtccagttctgaccatctagtccatctcagttctgtattaaaaggaggtgctgaaatgaccggcaaaacatttgtgtatttctgatagagtgaattctattaaggttaatattaatttttttaaaaaatcccttacatgtgaggttcatgataaagaacatgaagaggatgtggcactgggatttttatttaatttgagttcttgggctctggaaaacaatagttcctgaacatcaggaagccagacactttttaacacttccacagagcagcactaacacttatcaaacacttacacaaacagaacaactccgagttacttcaagaaactttaaagtttctttccatgtgttgtagttgatcactttccatccccaagctattatgatctggttggtgtctttgtcattgttatccatcaggaggtagcaaaggtggtggaagtatatggtcattcagacaggctcctattagagtgtctgcagaatagtaagtccagataatcggtcaataccatgaccagagtgatttctttaagtattcctaaataaactttttgggacattcctaagaaattacaaaaattactcacaaatgccaaatacctgtgttcctaacaccctgaagagccacctgttaacatgttagaatctttgttttgccaatatacactggaacacacacactaggagtgcaagagcttctctctcttattcactgctagacccacgcctttctccaagaatgcctgatgcacagtatgtgcttggtagcatttgttgaatcttaatacagggcatcacagataatgtaatagcatcatttgaccactactaacaatctcaagcttctccccgtttctcctgaggcactctcatgagttcagttggacacttcctgtttgttttttgtgttcaaacatacgtgtattcatgaacagtgtataatattattttgcatgttttagagtttacataaatggcatcgtaccacgtgtatcttttttgaaacttgcctttttcactcagtattatattttgagacatgttcatgttgctacaggtagtttttatttttccttttaattgatgttcctttaattttagttattcctctactgattggctttttgattgttctcactttttttgctgttataaatctatttcttattaatggcccccctccttaatactctctctttgggaatagaagaattttaaaaatgatattaacctcataatcacagccaattattgaagcactgagaggtcactgattggcactgtttgccagacactgtgctaagcacttggcatttattatcttatttaatcctcacaatttattttacaaactagaaaactggaagctgactttgcaaaaacattggttaaagtcccataacccagtaagtagcaggttcaggattcatgcccagttcttggatgccaaagccatgagcatgaaacatactccttcccttgcccttgtcctaatggggggatgttgaagtcattgtagcccaaatgagttccaaagagtggacaagagtagcagaatgaactattaatcttccttctatcaaaaagttgaaatgtctgttgccacgctttccttcttcgtgggaacattttttgcttgcctgtcattttaggagttgaaccaattgaaaggttcctcaccatcacttataatgatctttaggtggataattgggacagactacttttcttgatgaattaatctttcacaaagagaaggaaagtaaaaactcatctatgggacttaaccatcagctgtaactcttttatgtatgtattcatagtcatacctttaagaaagcttctgagggctatgtgttaggacagggcaggagtctttgttttgggcaattcgggaaaatatatttgaaaatatatttttactttttctcctttgatccagcaaggatgttttcctgctaatttaatgggtcatagaatgagttatatttgaagtaaattgcctgatcaagtatgaaatcagaaatgtgaagaatgagaaattttcaggactttgccagtggaagcctttctgataagcacataatactggtgccaatgatggtgatggttatagggaatgctttttacttatgtgctgcctttactttaaagagacacaaatcatttacattcacaaattgaggagccctgtatttccatcccattttatattgaaaataattgacatgaaaaataaagaacttggaaaaaagaaagccccagccccaggtggaaggagtaggtggccttcctcaggaggtttggaaaggatccctcaacccctgacacttcgctttcacaaagacttgcattctacaactggacttcttttttgtttttaaaaattcttttataaatgaatttttaaattcatcattattatttcagaataattatcattcattcagactaagaagaggatgccctaacaaaatttaatgatgaccaatggaattttaagaattatttagagatttttttttaaatctaaggtgaatggagaaggaaagaaaataaagaaaaaaattatttagagatgtaatgtaaaatgtaaggtgacctaaattcccactaaggtataaggtatcatcaatattgaattacactgtgggtaggtaacttgtgctgaatcctgtcatcagatcttttcctgaaaagttttaatgactgaagaggcaaaagaattcaaagctgctgctcctaaaatgcagtgggagcacagagtgatgtaaatggccccagaagagacgcctgtacatgcctgcagatacactgtccccacttagttgttgagactggtcctgtggtccaggagccaggacttgcatggggttctttaacaaccatccgctgctctgtccattatatgctttggagctgataaagccaccatcccccaaatgaggttaatgccttgtggggttggtaaatatcactttgtacacacctagcaagagacataatatctgtaggttaggagtttctgaaatttttcaagctgtaattgtgcttctgcttataaaaagctagattggatgtcttaagccattaatatgttggcctcattcctgccttattcctttgctatgaaggctttttatgtgttttagcttttctgtttctttgtttgtgaatggtatccctctccctcccctttcctagtaatgctgttgctttatctctcttccattcatattttttttctttctttttgctgcatggagactctctgctgtacaagtgtaagtattttttggtggctctgcggtttctggctgtactactttatattcttgtgctccatttgcttctgtgctgcctggctggtctcccaggagactgtagtgttgtcatccatctgcagatcctgaatgaaataggcaacaatttagagacaagattggattttgcaagatggttcagctagcaaaacaggcgatgaatttaaaatatctccagccatgtgcctgaaagcaagcagagtgttgatgaagaggatacaaacattcaagaggagacaagtgcttattccactcatgtaataataacaataataaagacatgattacttttaagatttttttcctgattcttgtcatattacttgtttcgggcccagggttgtagaaaatcgacattatgatttgcttcttatattaggagaactttcctaatcttcttctcagctggtattgttattttttttttctttctacagccttggtggtggggggaagtaattatggattcttgaacttggagtgagagtgttatttattattctttgagcaaatgtggcaaaaacaaagcacctctttctatttttatggtgacttaagcaacttgactctcatttttttaaaaaaaaagtatgtctaggaattacatgttaaaagtgggtttgacaggaaaaaaatgttacgttgtttggaaggttccaagattagtctttaacttgtagtaaaagtagacatatctcaattgagctatgtgcagaatagtttaaaattcattaaaaaatttgatcaaatgagtacaatttcagagtaatgtaggcattgatgcttttggattctcagaaaatagagttgtggcctttttgttcacagtgtctgccacaatggggacttattgatgatttgtgatgttaggacaagaaagaagtctgtgtttaagattttcctgctaaaattacatttaaaataagggtttaacacctttttcctcatacttttttgggatatgggttttgaaaattatacgttattgcttgcaagatgcattttttaagataagttaattttgtctaggcctcaagttgacagtgttaaccattgattgatgagaggtccatttgcagtatgtacctcttctttttcaaacgctgaccccccttcatctgatggacactttgtgatttctctgactcagaaagtacttaggcattaacaaatgtcagggaaaggtcaataaggactaagaaacagtttgaaaaaattgaccctttcattttggtacaaaaagagaagagagctaacagtgttaaagaagatggtaaagtcagattgttttctttttctgggatgtatttcatcaacccaacagttggggaggggaggaggaaggagcgcaaataaaccaaatttctagacaaacattaaatatttgctcctaaatatacacttaggtggataattatagtacattgttatatttcctcttgctttaggtttatatgtaatggcattgtaggaataagccaataagattaaggaagtccacattttctgtaaaactaaggaagaattacttccaaagaaaagtaataaaaatatgggagaaatgagattgagtttttttttctctgttgttgcacttaaatcccatgaaggaaagatacagaagctgggttgccttcttaataccaattgtagaaactagcctgattacaaattctattttagcaaaagaccattggctctgtgccaaaacttcagaactacaagatatgataggtatagatttatgggaaatgtaattagaagttacttacccttgtaaaaagcacacaaaataaaggaaagcaagtaaaatacattagagtgagtttttctgatattcaagctttctatactgggctttgaagcattggaaaacaagaccaagaggagaaaactagctcccctttgagtgatatcaaccatcaaattatcctgatgatttcgtgtgtttcttaattatgtctatgaaattaaactaagctgaatgacctattcacagatggacatgagtttgcaaatgtgattctttctgtacatattatatattgtcatttattttatatatagtacatatttttatatgtttaaaattataatatatttgaaatataatttttatatattttacatttatttggtatcataaagactttcatgatatggaaacttaaaccagactatttttgcctatgaatacacttcctgtaaaatataatcaagagtcaggaaaaaaaaaaaaagacatcttcagtccatgcatttttaaacatctttcctctttatttgtgacaatctaaatgaaattggctaaaaattatatctgaagctacttcttgattattttacctaccatgattgtgcacaagatggatagaatactgaagaacttgttgcgaccaaacacagcatatattttgatagcttgtatctcctgagaattactttcagagatttcacttgtgaatagaccaggcaggccactaacttcttcagccaactgcatggctaactttggggagaactgccttaaactggattcctttccatttgcattgagttagctgagtttttattgaacctgcaaaacctgttactttataaatagcttttcctcagtttgtctgcctttaacaaaaccttgaaaaaagccaaatcggcaagtttcattttgtattttaggaaaaccagtctggatttcaatacaattgctaatcatttttttatctcccttttctctcaacaataaataatagcaaaatgatattattaaaactggcataattgtcaaaactatagatttgtttgctttaaagatcagtatcagccagtttctccttggagctaaagaatgtttttcaatcatgtagattgtttttttgaggaagcattagatgaaaacctattaaatgaaagtatgcaaactaagttctttcagttatgttacctcttagtttatacacgtaccagtttcctgatatcaaaccagtgaaaacatccctaacatccatccatctctatatgggtcatgaatgatgtggcaggaaggatgctggcctgaccctcctcactgggttctgtccatggctctgctccttctgacaccatgaatgttagcctttgtcatctctgtaactcagtttcatccttggagtttatttgtgtaggtgatgacaaagcttccctccgtctttgacatttgtgtgatcctattgagggagaagatagtgcctttctgagggttggctttgcaccataaacagttgacaccaatgctaggaaagtgctcttcagttttggcccttggtttgagtttcggtttcattttttagaagattaacaggatcaaagacatttcactgagaagtgccagcagatacagatttttgaatcctagcaccttttcctggtctttgcccatgaagtaaagatcaaaatcttgggggcaaaatgtgaaacgagagtgcaactacttaagtcattgatgtgacacagaaagaggtcagggttgcttacattgatgttactgtgacaatgatcacttaatagtgttttcagtttttcgtgactgattttaacagtctttgatttttatttatgtatccattttaacatcctcttacacagcttggaattaaattcattcattgctcttttcagctatataagtggaattcaactggttagggatgaaacaaagaggttagctgtatcatttgagaaattgtaaacatttagaaatagtttggtctcttcagttaggttttcaatcatcttctaaagcagagaaacaactactgagttaaacagtcgatccagaatgtttcagaagtttgaaaggcaagttttctgtggctacctaagtgtttttttaaattattatttcatttctagatgacccctaaatccaaaaggaagagtatccatagccgaatgctgcggcctgtttctagggcttttggtaagtgttttgctgctgccaatcatttccttggaactgtgaagcaccctcagcaagaccttagaccattttagggatgttccttatggatgcactacatgggtaaatattgagaaagagttcagtgatctgtgaatgtgtgtttgctattctatgctagacttaaaattacttttaggaattttttatccatctctatgcattaagctttggccttgggctgtttttttgtttttttgtttttaattttagaaatggagtttgatctagataaagcgctggaagaggtaccaattcacatcgaagacccgcccttcccatccctcagacaggagaagcggagctcgggatttatctctgagttgccctctgaagaggggaagaagctggaacactttaccaagttaaggccaaaaaggaataagaagcagcaacccacccaagcagcggtaggtggactgcaggagaggccccatctctcccacacccttttcttctctggggaaagttggagggtcttgctaaagtgctttgcacaaacatgaaagctatggttaaggagactagaacctctttgcatgagatatacaaagtatctcaacttggtgctcaacaattttggagaatgaacagattgtgtcacttaaataaaacaacataattgtggagaaaacaatgctgtaaaatttccgattcttcagaacagagctgcccttggaaatccttagatagataaggtttatctaggataggaaatccttattctagataaatgtctctagtattttacagtgtctgggcaaaaaagatacaagtacccaaagaattaattggtaattaaaaattgtttgattctggagtgcacacatgcatcccccactccacaaactgaggtaactgaagtgttggagaagagccctaagtgggagccccagtgtgtgactcttgacatcctcctctttctactccagtagaagactcaattgtgtgtgctgatgagccttaatgtagtttacccatgtgtctctctggttaatgccttttctctcctttatagctaaacttcttgaaaaagttttcctgtgccaattgtctctactgtctctcttcttcaccttcctgtcactccacagtttaccaaaatcttccttctatatctacctaccctttaaaccaccctcccaaggtcactccagaccaaatcctgtggactcttcagctgtccgtcatcttacttgatgtttcagcagttccttgacacagaaagctctgtcattcccgacaggagatttcccgttgatctctgagtcatcacactcttttcttttccactcacctcttcagcaatgtcctttcagttttcctgccagacccatttaagttttttattgtccgtctgggtgatatcatctaactcatggttttagtctctgttgttgactgtagatttctggatatccacttgcctcctaaatttgaattagtaccttgggctcaaaaatttgaaagttagatcccacctttccttataagcctgcccttctcatatccctggtttttcttgggacatcatcagttgacaggttagaaagctgaatacgaccctgatcaccagctctccctcttccttcttgctaggctacctcccatcctgagctccagccctctaatgctgcagcccttttcttattgcttccccccatctcctgggctgagaactactttcaaattttttacatctctactacgtctctgtaactatccacttctctatacttctctgtccacacagtactctgggaaaaagccagatctatttagacctctggccataatacattattttaggacttacctttgtgttacatagtccctaagggaaaacagcctagagtatgccaaccctgtgagtcctggcttcattgtggacaaaggtgaagtctctccagaacagactgataaggttgggacatgctgccccaaaatatggcgccttggcatttgaggaaatagcaaaagcaggaagggcattctcatcttccccttgcctttctcccttgaggcagatcataaaagcggcattcaacaagtgccctctgtatagccagaggaaagaaatgtccttatctctgaagacttggggacagaggaaagaatctgaacaaagaggccttactaagtgctcccaggttattaccattagatcatagttatttctaaagaaggcaaggcttcttccaggaagccctccttacccctcccactgtgttcccacagagctagggtcacatgacaccagggaagttgttctcacaggctggttgtgcacagtgcacagcctgagcaactctccatggaggccccacctcctccagtgcctgatgcttactgtcacagctctcatcacacagagttttctcagcttactccttgtctttaagttctgtgtaggcagggcctgtgatttattattcatggtaatatgctcagtgcttacattgggttttgaatatagtaggggttcaacaatactcattggataagtaggtggatagctggagacatagatggatgaaggtcacaataacttacctgcctggttgatcatttcctcactttagatcaggcttttgttgtgtttggttaatttctctcatttgaatccaaatagcttgatactgtttcaaaatacaaaaacattctagtttgttgttttctaatttactgatttttagattttttagtccattattacatattcttatagggatatacttacctttctctttttaaaataagggaaatacttttgtagatagataaaaagacaaccccccccacccgcctcccgcccaacaacccacacttcaggttctaggatgttactgaataaatggtttctctatggctctttccatatggaataacactaacaatataacttgtctgcgaaatggcttaagtttatccttgataaaactggtgactcatggaaagagataatcttatgtacttttatcttttcttttctttttctttttttttttttttttttgagacaggttctcactctgtgacccagactggagtgcagcggcacagtcatgcctcactgcagccttgaactcttgggctcaagcaataacaatcttcccacctcagcctcctgagtagctgggactactggttcataccaccatgcttggctaattatttaaatatttttttttgtagagatgggctcttggtatgttgcccaggctaatctcggaactcctagcctcaagctaccctcctgcttgagcctgccaaagtgctgggattgcaggcatgagctaccatgccagccttttttccttaaatgtttgaaaaatagaaaagaaaggaaggaagctgtggcagagtcctatgtgaggtgcatactagatattgcaaggcagaacagagaatttctcatgtatcactaggtttcatggctgaagcaccagtaacaaaagacaggtcaaccagagaaaagcataagagaatttatttaatgtaagttttatgtgacatgggaaccttcagaaatgcagactcaaagaaacaggagaaacctttgtatttttatgctaagtttgatgaagtggatagttacagagaagtaggattagacaaagggggtatgatctaatggtaataaactggggcacttagcaaggcctgtttgttcagactcttctccctctccccatgtcttcagagacatttcttttatctgcctatagggagggcagtttctcgaatgaaacttttatgacctgcctcaagggagaaaggcaaggggaagatgagaatgaccttcctgcttttgctatttcctcaaatgccaaggcaccatattttggggtagcatgtcccaacctcatcaatctgttctagagagatttcacctttgtccacaatgaagccaggactcacagggttggcatactctaggttgttttcccttagggactgtgtaacacaaaggtaagtcccaaaataatgcattatggccagaggtctaaatagatctggctttttcccagagcactgatggacagagaagtatagattagcacacctttacttgagttcatagtgaaaatatattaccttatgatatcacgctgcttacagtttccaaagtgctttcatgtctaacagccctgtgaagctgccacacaggcaccattatttaaatttttcaggtaagaatgaggaggctgtggcttacttttattattagtgtttagtaagagcaattattaacaattatcgttgtttttcttcctaggattcagtaaaatcagttcatccaaagtctgtcttagcttttctagagtttgtctctgaaccctaatgcctcaaatgaacttttccaggtgtcagaattgtcagcgccaaggctgagttaaatgccagcatgccagtttcttccaggccaaacatgttgtaatgaccgatttttgtgccaaaaatgtacaaatagatatttatgtaatatgaagagtagataacctatttttttatttattttttattttttagtatttattgatcattcttaggtgtttctcgtagagggggatttggcagggtcataggacaatagtggagggaaggtcagcagataaatatgtgaacaagggtctctggttttcctaggcagaggaccctgcggccttccgcagtgtttgtgtccctgggtacttgagattagggagtggtgatgactcttaaggagcatgctgccttcaagcatctgtttaacaaagcacatcttgcaccgcccttaatccatttaaccctgagtggacacagcacatgtttcagagagcacggggttgggggtaaggttatagattaacagcatcccaaggcagaagaatttttcttagtacagaagaaaatggagtctcctatgtctacttctttctacacagacacagcaacaatctgatttctctttcctttccccacatttcccccttttctatttgacaaaaccgccatcatcatcatggcccgccctcaatgagctgttgggtaaacctcccagacggggtggcggccaggcagaggcgccccccatctccctaacgggacggctggccgggcggggggttgccccccacctcccagacggggcggctgccgggcagagacgctcctcacttcccggacggggtggctgccgggcggaggggctcctcacttctcagacggggtggccgggcagagacgctcctcacctcccagacggggtggcggttgggcagagacactcctcagttcccagacggggtcgcggccgggcagaggcgctcctcacatcccagacggggtggcagggcagaggcactccccacatctcagacaatgggcggccaggcagagacgctcctcacttcccagacaggatggcggccgggaagaggcgctcctcacttcccagactgggcgggtgggcagaggggctcctcacatcccagacgatgggcggccaggcagagacgctcctcacttcccagacggggtggcggccaggcagaggctgcaatctcggcactttgggagaccaaggcaggcggctgggaggtggaggttgtagcgagccgagatcacgccactgcactccagcctgggcaacattgagcattgagtgagcgagactccgtctgcaatcccggcacctcgggaggccgaggcgggcagatcactcgcggtcaggagctggagaccagcccggccaacacggcgaaaccccgtctccaccaaaaaatacaaaaaccagtcaggcgtggcggcgcgcgcctgcaatcccaggcactcggcaggctgaggcaggagaatcaggcagggaggttgcagtgagccgagatggcagcagtacagtccagcctcggctcggcatcagatagagaccgtggagagagaggaagagggagagagaccgtggagagagagggagagggagaccgtggagacagagggagagggagagggagagggagactggggaaagggagagggagggggagggggagggagagggaacctatttttaaaaaaggaaactaggcacaaaaatttaaccttagatcaaaccacagtcattttgagaacaatggatatagatattttagctatatgtttttattccacctctaccactccaaaaacaaaaacaaagatttttttttaataacaagagctagaatgtttctttcttttttcctttttacttaatttaagtagataaaagaattcttaaaaattacattatagctgcttagcccatagaatttaaccttctactgtagtagtaagagcaggatgctaggctcagccagtgggctcttccactccctggcagtgtgtgtctggacagaggcttgtgggttttttttaaaaaacctgagccaacttgtttctaaataccagcattgcctacgtcgttgagttgtcataagaaataaataggataaaaatatgccatcctttacttaaaaacattgttgttcaaagctagtatttccattttaatattatctttacaatataaatcttatatttgtttttgcttttgtacccattctcccttttctacacttaaatggaggaggaagagaaaaaaattcctggaaaccgatttaataccacactcatttaccctcattaattcaaagggattcttacccatgtttactaagaaacaaattaactaactttacatacaattttattcaaaaattatttcctcagttgaattgactgtcagaaagtctttgcttttgggaaaagagcatcacatgggtaatctaagagtggaaatgccattttctcaggtaccagaatgtgccagctacaacagagaaaagggggaaaacgtgtagtgtacagtgagccctccatatccacacattctgcatttgagattcaaccaactctggattgaaaatatttatttaaaaggcaataaaaaaaccacaacaataaaaaaattatataaattttaaaatacagtataacaattatttacgtagcatttacattgtattaggtattataagtaatctagagattatttaaagcacacaggaggatgtttgtaggttatatacaaatactatgccattttatagcagcgacttgagcatctatggatttttgtatcctcaagcgtcctggaaccagtccccctcggatactgaagttcagctgtattaagtggggtaacactagctactatatgagataaacctttactatgttaaatctctgatattttggagtttatttcttgttcatatcatagtccattatgggtatttctggccaggggacactacagttgtcagggatccaggctacttttactttgtggctctaccctcctttttggtccctcaagtcatatgcattcagctggaggatgacataaagcatgaaggttcatacctctgaggttttaagggccaggtccgaaaggatgagcttcacattcatctgaataccactttccagaacttggccacgtggccacctaactgcaggtgagcattctaaccacgacacccaacagggatggaggcatgcttatactcactcatccactgccagttagctattgcttctttctactttttcctaacatagctataggtgacaagtattcccttaaggaaaaatcattgaaaaatttgcatagaggagtggaaagaacactggactgggatatagtgctgactctaccactaactggaataatctcctagtggaaggaattttaaagattactcaatattcaagggaatatgaagcccaggacagatacctgatttgtccatgatcattctctgaaatattataccatgcagtggcttcactttgtgtgataggtcagtatcagtcagtttgccatatattctcggcatagggcatagccccacactagtcggcccaatgatgaaacaaaccaactcaaattaaaatggactaactcctgggtaataggttttctcctgtatgcattgaatcatggtgtcataaggctgaaaaggatcttcaagtcatcttgttcagcccctcatctggtgcttaaaaatccctacacagccattgattggccattccatccacaatgacttctttctctgaagctgccattttcttaaagctctaattattagcaaattattttttgtgttgctaaaactcttactgtatagcttgaacttagccatcttgtttcagtcttctggagtggcacgtggtatccaagtctcttctacttagtagacttaacaatatttgtgggccaaatcttaattcttcagctctttcgatgtacttcatatgaaattgtctggaatccatttacaagtcttgttactctgttctgaataaattgcagtgtggcacccaagacaaaatagagtactttagtaagatctgccatatcgcttctctccttttatttatttatttttgagacagggtctcacctgtcacccaggctggagagcagtggtgcgatctcagttcactaccacctccccctcccaggcccaagtgatcctcccacctcagtctcccaagtaactgggattacaggtgtgcaccaccacactctgctaatttttgtgttttttgtagagacagggctttgccatgttgcccaggctggtctcaaactcctgagctcacacgatccacatgcctcagcctcccaaagtactagaattacaggtgcgagtcaccacacccggcccattgcttctctccttttaaataggaaacttctatttattcaaccacaggttgcattcacctttaaaatggctatatcatccaggtgactggtattgatcttattctcaggcaaggtctataatctgtttttatacacatatttcagacagagaaaaagggggtgcatgcagcagggaatctaaactacccggaagtcctagtatacttccagttgcatcttaatggccagaaatgaatcatatttccatccccagctacaagaaaatctaggaagataaatagccagttggtcacatcaatactccaataagtcagggttttgttattgagtcaacaagagcgaatagacactaaatagacacaaagcagtttctgctgtaatttattcagttaagagacttttcttctattttgctaattttgttttggaatgaatggtagtttgattcttttttttcggtatttgttgagactgataatttttcttttttaatgtgaaacttgggtgaatttcaacatactttttctagtgttataacatttttagtcatgagtttttgctttgttttaatacactgctaggctttgctaatattttatgagaacttttgcatctatatgcataaataagagagacttaacatgtttatttttcttgtctaaaccatccatctagtttggctttcaaagttatactatctccataaaattgattgggaagctctttcttttctcctattctctggaacagtttacatataatagagattgtctcttcctctcctgggatgccatctgggccctaagtgttgtctatatgcttgtgtgcatgtgatacttgtatgtagatatattactaaggattttatttcttttgtcatagatctgttcaggttacctaattcttaagatcattttgataatttatatatttttaagatatcttccatttagtctaattgttcatttaattgtttatagaattcgtttaagtttttaatttcttatactgatagctttaatctcttatatagctatgtccccttttccattttaacatatttttaatgcctgttctcttaatgttgtcatctctttttctaagagtcaactgttttatcaatcctctcaagttcatttttttcttttattatattttcttcattttacttcctttgggttccttatatcttgattgcttagctaattaattttccatgttttttacattctaatatatgcacataacattccatgattattcagttcactaattagcactccttggtatatctgttcaaagaattactaatgcacctaattgtccttacttcctgcccattcctctccatctagccaatgaagacattgtgagagatttggcagctgccgcatcaaaatccaggtgcaccgcctactgtctttccctggtgtattcactgtaataatcctggcagagggaaaacagggtggtctgaattgtctttagtcctcacgatcaccagcttattttctcagcattcacgagttatccttttagcacttacacactggaggtgcaaaatctaccttctttatcaaatatcagcaacagcgattcctgattttatttgtaaaagcctttctctgagtgcaaatgcagtggattctggccccaggctcacggctgaggtttttgctccctccttttccaacagctgttctacccttttcagtctgaaatgtattctccttgacagaaaagaccaaaagcaaatgggattttgagaacttctgataactgtttgtcctttcctttgcttttgttagaaaaggagctgaaacagcatgtacatttgaccttgaacccttttgcaaactacatttcaattcagtcttcagtttttctactgctcttcacgtaggctgatgccacctcctgcttcctattttaacagatgcattttaaaccatgtctcatggaagatctcccagtgatactggacttctcttaatctttctgctctctgtctctttatctctaaaatgacagggttggactggaggatctgtaggggccagtccagccctaaaagctgggctgtcctgcaggaaagcaaactgttttgttcagctctgtgcctccatctctgaaacccattgatgtaccccacatccccagagaaccttttgtgctggctgtgacttctgtttccaagcaggaaaagagaaatttttcctgagggaagaaattatacaagtaaaactttgttttttttttgtttgtttgtttgtttcaaaatgaaaagaggaatcattgggggaagctgggaggaagccctgtgttaggaccgtatgtcctggggtcgcatctttcttcatccatcaatcaggtgaccagtgtgggtgccgctaaccttctgagccactgtttgatctgtgactaaccaaaaagtaggatagtactatctctttcagtttaaagggtagacataagggtgacataataacgtgtaaaacacatgtaaactgtcaagaactatattaacttaaggggctattactgctatagagattctatcctcaatacttttccaaaagggaaaaataatataatacaagcaagttctgtactactttatcttttgtaatcaaagtttttcagtgagcttttttctctgcataacggaattatagaactttgctgattgtctgctcttgtgcaacatgtaggaaaaccttgctccaatataaagcaccattcagatgagaggtgtaattgttatttcatagggttctttgcctattatctgttgtctcttcacttttcagcatgtcacaaacatgaactcaaacacatagttcattttcgtaatgagagcttcccaatgaatgaagcggatgattgttcaaggggttttttctttaaacaatttccatacagacataagccatgttccccctaggcaccttgagacttgcaaatcaagattacaggaaacagctttcccaccgctctatggcaagacatctagaccaggtatcccaaccacatgagaatttgtccttgtatccaacagcatgggcaagatgcatgctctctctcagtcatccacaacctatctgtgaaatattaatatacattgcagacacaaatcaagcatctgactaagcttactatgagttgtcctttcaaagagacatgctaacttagtatagctttctgatagcttctcaccagcctctctcataagatcggagtttttggctgcctgctggacacctgcttctggatttcccacaatacctcaaacactcaagaagataagatacagcttttcccccaaatatgatatttgtaacgtgttccctagaaccatgtccccatttacctggcctagaaactttgaccatatcttgggcagctcttgtctttccattctcacttctccacttcattagttcctcatcacctccagattacattaaattattcaagagtctttgatttcagctcctgaacaggtttacctacttatattctctggcgtctccaattggtccttcatactgccccagaattacctccccagaattcaggctgggccatgctgctgcattggtggctccctatcatctaagcagtaaattccttcttccttagcataaggctcaaggctgttccttatgggttattgtattattagttggaaagtattcaactggatattatgaaatactcaatactgactcaaaagtgacttaaacaatgagaaatatttattttctcacctaacaaaaaatccagaagcctcaggatccaggcgtggcttattcagcagcagagcacagatacccaggtgctttcccctttctgctttgttattgtcaaccagcgtgcagccttttatccttgggcctccccatttggtgaatgccagtggccttctgcagctcagacatcacatatgcctcacataactgcagaaaaacacattctctcctcctgacaaaacctgcccccatgagctccctagcaaatgtccccttatatctcacacaccaggattatatcccactcccatgcctgttaatcacagacaagaggaagggattgtagcttaagcaaatcagtatccataatctgactctagggctcttccagcaagaaagaaagtagtcaggggagagggttaggggaagccagtaatagcatctactatgttccatccttagcagccagcctcacccacacacctcagggccctggagtcatcaccactctcagaagtcagtgcgtgtttcatttctccatgcactccctttccccttaccacacgcctgcagtgcctttctctgcctttagaaacactcgactcgtcctatctgttaggtccaagcttctgatgtaccagtcagcatgaatctccacaaggcatggtgtttatcgtgcatccctcacttttgtttcttcttgtctgtgttatgattgtacatatggcttctattcctgtagattacgtggtccctattttagtgagccttgtccctcccatagcccttaatcacagtgtcttaaatctagtaataaatgtttgctaaatcaaggtgcatgtgaattaacattacatctgtttgttttgcaggtctgtgctgccaacatagtctcacaagatggtgaacagaatggtctcatggggagagtggatgaaggtgtagatgaattttttaccaagaaggtgaccaaaatggattccaagtgagttcagagtaatttcactgataatgctattttattcatatttaaattactaacagttacaattaaacttagtatactaagtttcattttatatatggaaattactattctgacagcttgcaaaatatggtctctgggccggcaataccagtgtcaactgggaccttgttagaaatgcaaactctcaaactcctaccccagacctactgaatcaaaagctctggaggttgggcccagcaatctgtattttaataagccctccaggttatgctgaggcatgctccagtttgagacctattgtacgaatctaaaccagaccacaaaatataccaccccaagattcttttagggctttatcacttggatagttccattacagggtaatgatcatggttatgctggaattacttactttgagcttctccttgttcataatttgatttattgggttggggggctaagtcattgctaaatggcatgatttaacagacagtgtcaaaatgacagcaaaattagcagagagccctcagagtcagcattttctgaagttttctcctcattttcttgctactgagacagttcccttagaagatagttcagtggtacttttgttaacagttctttaacttgaaacatttcagtctttaagcatgatttgtaccatgttatttaatcctcaactaaatacaaatctatcccaaaatacactcttaacatggatttgtctttatgaagattctcaccttgagatatcaaattcaggaacaaacataagccagataagccaaaggcggcaggctgggcacaggtagggaagcaactaatcaattctattagatggatgtgccttatcttgcctcggcaggatggtgaggtggcagtgggttaaattttatatccataacaatgtaacttactgaatcttataacctttaggacccaattatttgtcttctttgacactggccttgaagcttagcatactatacttggcaaaattttgttctgctgtctttcaagaaccaacctaaatgtcatttattctttgaagcttttgtgggactgctcctcccacccccccgaattaattgctttttctctgctgctgacttaatacttttctttccatccttcagacacatctgttaaagcccacggaatcctttaagagtttgtttgatttttaatttttttataactgaaggaataggtgaatgtgttttcaatgtaaaagattcaagaaaaaccaacacaaacatatagcaaaatgggaaatcgctgttaatgatttgctttcaaggcttttttcccaaatagaatgctactcttcaggagcgatacctgggccttattttgttatagcttcaatgtctaacgcagcccataatatatagtctgcccctcaattagtgatggttaaatgaatggagaaaatctcgactcatctccatgtgatttacagatactattgtttgctctttttaaacttctgaaatttatattcagttagtgaggtggtttataagcattcgatccgaactgtacatattgttatacccgtcccagtgtgattttctctcccgttaatgctagtttcttctttaataggctctgaatgaaagttgggtaaattttgtaaggtataaaatatattttttttataaagatactgctcaaggaagattccgttcatgtttcagtgcacaaatagaaataaatacgtcagttttcatcatcaaataatatgatggaatctactaaaagttgtgatttgaaatttctttataaatagattattgtcagtccaatctttaaaggtcaagggataggtaaaatcatgaagtagtacgaagaaagtttgaaaatcaaagttataaatgctcataaagtgtcagatgttctacaaaggcttaaaaaagtttccttattattttcccactccctattccccagaggcaactaatttttattcctttagctgtttcttccatttgtcttaatagcatgctttcttttttctgttttctgtgtttcatttttagatagtactgtaaccgctaacttcttacttaaatgatgataatacagactgagtgtctcttatctgaaatgcttgtgaccagaagtgtttcaatatttgggattcttttttgaatatttgtattatacttgcagttttacatccctaatctgaaattcaaaatgttccaatgagcatttcttttgagcatgttggtgctgaaaaagtttcaaattttggagcatttcaaattatggattgcagatactcaacctgtatactctgtcaccaaacacacagacacacacacacacacacacacacacacgtactcatgtacttagacacacacttttccttgccccactttctttatttaattttatcataattggtgtctttgtctgttttctgttgttataacaaaatacttatgagtgggtaatttataaaggaaagaggtttatttagctcatggttctggaagctgggaagttcaagtttgggtggccacactggttggcttctggtgagggcctcatgctgcataatggcatggcagagaagtgaaaggagaattgagtgtgtgcaaaaagaaaggagggatgaaggaggctgactcacttcataacaacccactctctcaagaatgtatccattcccatgagaactaatacagtctcagtaattgattttaataacctaatcaactcttaaaggtaccacctcccaatactatcaaaactcatgttgagcccaagcctcaacatgagttttgctggggacaaaccacaggagttggttagatcaatatttagtgtttgcttcatcctaaccatgtaaatattgacaactgtgttagatcgtatactgtgattacattttctttctatagaattttttgttttccttggtgttaattattgtcccctttttcatttgctttgttttctgcattcctttcactgacttatctcctaaatctccagtaaggatataaatttcctttcagtttgttcaagtattctcagttttttttcttcttggacacacctctcaccagcatctgaccagctccagtgtgacctctaggcccattccactgctgttgtctgggatctcccttcatcatctgctgggggattcccttcacctcgtctctgtgtcatttttctgtttccattggcccatgttggtcttagtttatgcccctgttttggtggagcaccttcttgaattgcttcctgagaaagacagtttggaaaacaagtttctgtaactgttgcatatctttcatttggattaatagtgtcactaggtatagaattgtaggttgctcttcattgtaccttagcattttgatagctttcctccattatcttctagcttccggtgttgctatgagaatctgatgttgacttgagtctttcttttgtttctgacttgcttttgttttcctgctcctggaagcatttgggatcttctctgcattcccagtgtactaaaattttatgatgatatgtgccctgaggtgggttttttattttttaatttttttaaaaaaccaatttgcttgacactcataagccatttcaatctggaaactcatgtcctttgttgctgaatttttaaaaattatttctttcataatttcttccttttttctctgtactttttttcttaaacttctattattattattatttgagatagcatctcactctgtcacccaggctatagtgcagtggcgtgatcatggctcactgcaactttgaccttccaggctcaggtgatactcctacctcagactcttgattagctgggactacaggcatggaccacccctcccagctaatttttgtattttttgtagggatggggttttgccatgctgaccaggctggtctcgaactcccagggtcaagcagtctgcccacctcagcctcccaaagtgctgggattataggcatgaactaccatgcccaggccattactcagattttttatttcctctgttaatccactaatttctaccttttctctcctattttttaattctttatattccctttgtttttctgggagatttcctcagttgtatcttccaaccttgagttttctacttctgctatcacattttgctattattcatgttggtggatgcaatattttttctcttccgtgttgaaaaggaatgggggcaccgaagagcttcttggaaatttgtgggtagagcttgtcgactggtgggcttcaatgtagggtggtcttcctggaccattttgttgcggggagagggtatccctgactctcagaatctttaggtcctttctgttgagctttggaaactttgatctcctgcctggcaggtataaacctgcctgtctgattctggcatgcagagggagaaaaagtcccggggatgtcactgctcactgtgcaggctttcttgagcctccctgtttcgtgatcctcactcagctcagctgcatttggagtcccccagctcagcttctttggttcattctttccagagagtgaacttgggtgttgggatgggcatcattggctctgtggtttagggagaggatccgatgaatttttgaatgggcttcacaaagaagagaaccttcctgtcttcatttccccttcacttccacttgcagaggtgcccgcgtctcctcattctggagccagcacaaatcaaatgcttctgggtctccccgactgttggcttaggtttcagctttctctgatctattaagtcaattttcacacataactagtgtattttggcttccaaattttattgtttttgccttttctcccctgtagggcttatgctttcttttataaatcctttgttattattttaatggcgattcaggggagctaagtggatattcagtctgccagctttaaatgagacaagttgtctgtgatacttcctacttagctcatttcattgactccttctccccttccatttcccaagtttcagcatattctccttctgaaaactctcccagagcatactctctgccttttggaaccaaactcaggtttagctgcttgcccctcaaaaagtcaaacgcatgagaagcaaagtttggtttatgcaagtgccgacagcttgggagatggccagactcaagtcgcaaaaagccatctcaaattttcaggctggctaaaggggttttaaggtgaaaggcggcatgaaaactatgcacaggagtggtgtggggtgcaggtctgttggttgttttctgatgactatcttgagtaatggaccatttggaggtctggttggtttcctcttggcaggggttaggttatggattaactgtgtaccaatttctacttggaagggagaaaattgtaccaccacctctgttttatgcctggattgttttaagattaccctttggaattctcaagcagagcaagtggttatatatatatataaaacaagaaacaaagggagaggggttacttttagagtaagctagcaaactggctgtaccagttacattttcatctttcattcttaatgtgtgcgtgcctcgattttctcacgtgaatatgataatgatattccacattcctttctgtttcctaagggcggtaactcaaatctgcttttaaaaatgcttctgaatggttactgtatatgtagcaatctccatatttatattttgactgattcttgctggaacttatttacagtaaaaacaacagatctgtgtcttggtttgaaatgcaggaaatggtcaacaagaggctcagagtcccatgagcttaatgaaggaggagatgaaaagaaaaagcgagattctcggaaaagtagtggctttctcaatttaatcaaatcccggtccaaatccgagcgaccaccaacgatcttgatgacagaagaaccctcctcaccaaaaggggcagtcagaagtccacctgtggactgtcccaggaaggacacaaaggccgccgagcacaatggcaattctgaacggatagaggagataaaaacacctgactcctttgaagagagtcaaggggaagaaatagggaaggtggaacggagtgacagcaagagcagcccacaggcagggcggaggtatggggtccaggtgatgggcagtggtctgctggcagagatgaaagccaagcaagagaagagagctgcgtgtgcgcagaaggtaagggtggacctatttttaattcattcatttatttgatatataatagatgcacacattttcatggtgcatgtgatatttttatgtatgtctatcaccttaaacatttaactttcctttatgctgggaatattcaaattactctcttcttgctattttgaaattgacaatagattgttgttaactagagctaccctactgatctgtccaatactaggtcttgtttcttctatcagctgtgttttttgtacccattttgtacctcttttcatctccccccatgtccccacacttcctgccgtctggtaacccccaatctactccttgtcttcgtgagataagtgggggttcatttttgacttggttgtccttgtttgtgtttttgccctcgctgggtttatttgggtgagaaaataaaaatagcctgttggttaaatagaaatccaaaaccataacttattgctaaagaacctggagcacagaccctaaagaaatggccatgttctcactttggcctgagggtcacagtcttgtggagtgccggcattctaacataggctttgaagactccggtctttccccacctgcccaggggcctcctgtgcatgttgtggaagcatgtcagagatgttccggggccaggtgaaatgctcacatctgggggaaaagacagtcggctgaatccagatggaagactgagggtaatattgaagataggtgaactaacagagggaaataaaaacactgaaactagattatatataaaaatgggaactattttctaacttattcccttttcaaacctaaaaattattctctttttaaacctaagaatgccttgctatattccagatttaaaagacaaagacaaaagaaaaaacactcaaggtattctattagaattaactgaatatttgaccattgatatatatcatctgttgctacagagaataacttcatagtttaaaatttgctgagttccccccaaatctgacttaaaacattatttattcttcaaatctccttttaaagtataaggagtctttttcacttttctttttacccctgttttctcttgtcactcactacatgaaggattgtatctgtgtgataagatgaacatacctatgtttaagtcaggttgtggtttctgtgcattatcttgagctccattatttttacacaactggttctccaagaaaggaaatcacatgtctattttatttgaagtatcacaataaaacagttcatcccggtgagcccttgactttcagaaagtaaacaattaactacatggcaggtgtagggagctcttttatatggcttctaaacaaccaatgtttaaaaattaaactccacttcccacctgatcttacaactatttaccaaagttctcccaccaacatcaacattatttagcaattctttaattgcagaaccctcctaattcactgagcaacccttagagttgggagagaccacagaactatatcctgctcactcaacaaaggaggcatggtgtggccctcactggtcagaattctggataatactacaaccatgtcattagtgagtcagatgcccaaggaaatgttaaaattttaatccatgttgtgaatttctttataacaatgaatgtgcggttttgattaatatgctgtttatgtttttcatgattaacagtttctttttggtgtaaagatgacatttactagagtgttttattcatgtactttggatttgatatataaatcgacttaaagtgacaaaacccttatggttttatatttgtttagggcttacacagtattaatgatctgttagcgccatctagtgtcactttaaaacaaccattgttaaaaattcttgctatttaaaattcagaccagtcatgggtcttctgtcaaaatcattaaataatgaagtttttcaaaaattagctttagaacattttttttctaaagtaccatgactgtattctttctaaaggtagcaacaatagcatcaatgatcaatatactgttgataaaatatatgatgtcttcaccctcctataagtaattctctttgcgttgctggcatttgagatatatacatataaatatgtttaaagaaaaagaactgtaagtatgaagatatgacacttttcatttattgacaaaagagagaaataagcagtgaatacttagagttcatatattttcctctggggcctccaagtcatctgtccacacacaaaggcaatgggcattgtattattttatccttattccccacagtcactttgggatttataaataactttaaaaatctgggagggaaaagagaacaactcccaggattgctttagagatgcaggcaaatggggtgccccgggtacagaatttaaggaggtcctcactttcaggtgcctgccatgcacttggaggaacctgaaagggaaggatgtgaaaggggacttcatggatggtccccagccctgtcctgcagacacttgtcctgggcacagagggctggcatgggacttcctttttaggggatcacttttccatagtgatgccgaatagtgtgcttgtgttagctgcagtgcttgtatacacatttcctcctggagatctgttcagcaccttgcattcatgacagtggagcttttgtcatcttcctgagaaattcctcagccttcctgccacttgggtgcttccttctgatagagccagcactcctggggagtgtgtgactggggtagattgatgaattcagggaatgaggcttatctcacctgcatttcaaataatacttcctgtatcatcaaacacagtttaaagttaggaattggctgcagagctttttaggtttgtcagaagcatgggatgagcaggaaccagcagtctgaaggtcagactgccttgggaatcatcatgcctgctggtctactggtccacagtgtttttgcttgttagacaggcagtagatgtagaccatctttgtcaatataattcttagatgttatgaagtaaacaccagactttgctttgtatatcttttttttgtatctaaatgcctcagtctagtgtagactttctaaactttctactcctaccccaagacagtggcattttactttccccatcatcaccatcactaattcctcccacctgcagatttttaaaaaatttattcggtcctgttcatctgtatttacctcctaaataatagatctgtgtcatgtggttctacctcaaagcaaggaagaccctgcctatttcaggacccctttcacctgtattatcattgaggttggaaaggtttctgctgctttgaaaattatatatatatttttaaatagataaggtctcgctctgtcacccaggctggagtgcattggcacgcttttatagttcagtgcagctttgaactcctggggttggtcaggtgatcctcctgcctcagcctcctgagtagctgggacttcagatgcatgccatcatgcctgactaatttttctattttttgcagagatggggggtctcactatgttgcctaggctggtctcaagctcgtgacctcaaacaattctcccatctcagtttcccaaagtgctgagatagattacaggcatgagccactgcacccagccaaaactagatttttggaaaccaaacctagagcagattctgtacatttctagcatgcaagggccctcatcacataaagcatcaggggctgcagagcctgcataggtgttcaacaagaaaaacagtaaaggtcaccaagcccactgactttccctggccccatgcacctctcacctgtgaggagccttccgaggaaccaaaccggccacactttggaccccagagtcctgaccgtaaacacagaatagaatgtgtttctcacagttttgtcccagccagagagcctatggagacaggtcaggcacagtcaccataacagcagctgagttaaagagcccttctttgctgtcatttattatctgcattgttttttcacttttgcattaaataaatgtgcactttttggggggatggtgcttgaattttttagaagcttgggaatgatgccgtatcccaggattcttccagcccagctttgagcggcgtagaacggtcggatggaggtggggcaggtaagtcaggccattgccatcacccccttaggaaaagcgcttaccttctgattgcagagtcacatgattgacagaagaaaaatttaaacagggaggcaagaactgatctctttgttgtgtgttctcagctatcatctgaaagaccatatcccttcacctgccttatcttcccctggggcacatcctgccccactgtagcattgtgcctggacagggcactttttgatttcccaaagggaggaaattctgactgttttttcattgcaaactcctcagctttgagcattttggaaaagttgggggtgggggcagcatacaggatcatggctgatgtatttaagaataagccatgcatgacatatggaagatgggtggctgtcttgtttggtatgaacaatatgcttcgcttgcagcttgaatatgcatgaaatccaatatcccttgtccctctgacttcttaggtataataaaataagaaaataccttagatgaaaactagagagtaatgcgttaactgtgtgatagaatcctcactttgctatttgagagtcttatgcatagctacagtatcttggtgcagtaagagttggatgataaatcacattttatgggcttatttttgccagttgtcttgttaaattaaggcagcagtatggatggaggtgggggatgagatgacatttctggagctgttctcactaaacatgagattgcagccgtcagcatcaccctcctcactcagaacctgtagccagagccctaactgcttattgtccagaaccaaggcacttacattcggttatacctgtaccttgtgccagatctgagaaagacccaaatatttcaagtgcatgaagaaccactgttttccttgtatgtgattacggcactgtacattattaaatataaaagcttgtcatcgctggaatagtcaggggtgatcagaaaacaaccaaaaagtttattgcttttctacaaagaacgtcactcttcctccagcatgttttgattttaaaacatgctagaacagcatattcttaaaatactcttaaaacatccgtgatgagaaacgatggcaaatgattacagcagtttgtaccagacttctagcttcaagttattggcttctttgacctttgatttttaaagtggcctttttcatcttagtgcctaaactgcacccaggtcttccagagaaccgctttggtttgggaacaccagaaaagaataccaaagcagaacccaaagcggaagcaggctccaggtctcggagctcatccagcacacctacgagcccgaagcccctcctgcagtcccccaaacccagtctggcagcacggcccgtcatcccgcagaaaccaagaaccgcctcacggcctggtaagagttttgcagttagggagttgcattgtgaccaggtggcttcccagagccagctggatcagactctgcaggtggtttcaggggcagctggtgagcgaggtacagcggcttctgcaggaggggatcacaagaaacctatgcaaagctgtgaaagtgatgagagctgacggattcttttatttaatgcagaggcccaccatgtgtgagagttggggactctgagactgtccttgctttcaggggtacaggttagtttgtaggcaagacagggaaatcagtcttttgtcatgttgacccatctgtagtgctcggcttggctttctaatatctgtctccagggcgttcagacattttgaaaagcagcagtttaaggaggaaggctacaaatggggaaagcacaagctctgtggtgtttatgccatattctatgatataacaagggtttagaacaagacttggcaaacaatgggcctgtttttgtgaatagttttagtggacacagccatactatttttgcgttggtgtcacctgtggctgtggctgcgctacagtggcagagtggtatacttgcaacagggccatatggtctgcaaagtgtaaaatatttactcttgggccctttacaaaaaagtttgctattagtttagaaaatctaatgatagaagaaacttaaaaatattagaaatggattggtcttcaccttattctctcctgcacaaaataaggccaggtgtggtagtgcacacctgtagtccctgctacttgggaggctgaggtgggaggataacttgagcctaggaatttaggctgtgatcacactgtgaccacaccactgcactccagcctgagtgacaagaccccgtcaccctatctcaaaaaaaccaaccaaacaaacaaaaaaacacacaaaaaaacaccacacacacacacacattaggttttttttttttaatttaacttaccattataagaattttcaaacatatacaaaagtaggataggtaatatatgaaagttacatcaattcttcacctcttccccttgttctcccacaaaaattagtcaaacagggataaaaatagatagtcagatcatcatcatggctaatctttgagcacttagctgtgtccttggcactatagtaagtgctttttgatgaactctcaatatcctcgtcactgctccattttacggatgaggaatatgaggcacagagatactgagtttgccaagtcacgcagctggtgtgtctgtgtagccgccagatgttctgactccaccaactgtcgtggtaactgtttctattgacctctcccccatggacatgtatattgtaaagtaggatgcacagctcatcctaataatttatcaatgtgcagatggtttgggtagaatgagcaaaaaggtagaatcctgtgtgtccaaacttcttccacttgtggttctttcccatgttccgtcacatattttttttcatttcccgagtggccagcttggacagtccctggtcttcatagcccattggtcccttgagaaaaccagtgaactgtttccaaagagaagccacaaagaaagtggtgtactggctttacctcaaggaactaagccttgaaacaaaccccttaggacttcctaattctactcaaactttttcccaaaccaaagtttatgatggggaacacaaaaaatttcttggtccatacacaatgttttcatgtagaaggagtggagagaatggaggcaaagaaaatagaaaaaatttttaatagaaagcaaagcaaataagtactcaaaaggagccttgctcctaacattgtcatcagctgggtgtgtctctactctgcaataaagaaatagttcttatagaatgaatctagtttgtagagtaacctagtttgtagaggacagtaggcccctcttatccaaggttttgctttttacagtctcagttattcatggtgcagatattttgagagagagaaaaagagagagagaccacattcagataacttttattatagtatattgttataattattctattattgggttttagtgttaatcccttactgtgcctaatttatacattaagctttattataggtgtgtgtgtgtaggaaaaaacacagcttatgtagggttcagtactatcccggtttcaggcatccactggaggtcttggattgtatcccatgtggataaagggggaccactccccagtttctaatgctgaatataaaactagctgaattcccaatattctgttgcaagaagttttattttgtttatttactaaatgtgttatttcatagcacttagtatatcaagaattatgttaataaacctatgtttttatagagcttgggaattcagcaggcattttcaaatacaccatctcatttcctctccgccacagctctgacagatggtgaaggtggatagtgttatcttcacatgtcttatcacatccctgcttattttggttaagcaagtaggcgactggaagtttaagactgaagagaacgtggctgtagattgtcttctacgtgcacagacactcacacgccaacttaagaaccaccttgctgataacagcaaaggaagaagaatgatccagtagtcaagggtgtccagtcttttggcttccctgggccacagtggaagaagaattgtcttgggacatacacaaaatatgctgacactaacaatagctgattacttttttttttaaagcaaaacaatcttgtaatgttttaagaaagtttacaagtttttgttgggctgcattcaaatccatcctgggctgcatgcttgtccaatcctgtgagccatgggttggacaagcttgtggtagattctttcaattagggtgaaacagccctggtttttgaattaagagactagaattggccaggcgcggtggctcacacctgtaatcccaacactttgggaggctgaggcgggtggatcacgaggtcaggagatcgagaccatcctggctaacacagtgaaaccccgtctctactaaaaatacaaaaaattagcctggcatggtggcacgtgcctgtaatcccagctacttgggaggctgaggcaggagaatcgcttagacccaggaggcggaggttgcagtgagccgggatcgcaccactgcactccagcctgggcaacagagcaagactccatctcaaaaaaaaaaaaaagagagactagaattctagtcctagctatttagtcatctttttcgttttcaatctcttcatttgtccagtgcccaaagtcttttctggttctaaaagaccatgattccaaattattgttagtgacctacatatatgcatgcatgcatgcatgcatacacatacacacatatgtatagtgactattgtactgggtttgacaacaggtaaaggcagtgtcttataaatattacatattttatgaaaaccaaacagcctttgtgtttaagtcagaaggaacatatggttcacatacagtctaattttcaaatagctgtgcattgaaattcttgatctacaggatagattcatatttgtgcagatattaactttttatgagtattcattgtttttcccttttgtttgtggatgttacttcactgagcaaaaacacaaaactaatttttggccagaaaaattctatgatgctttatttttttaaatgacttatttttatatatagatttaccaggctttatgttcttggaatccagtttgtggaacagtttgattcacgtgtttgtgtctccttagatgacattccagactctccatctagcccgaaagttgcccttcttccacctgtcctgaaaaaagttccttcagacaaagagagagatggccagagtagcccccagcccagccccaggacattttcacaggaaggtaaggattgtaaggatttcttttctctgggttagctctccccaaggagggacatttcaaaataaaggaactcatcctggactttactaatatcttagagtttgttaaagtcaacattgcttgggttaaatttttggaaatggagtagtttcttagttcagaaacttgattcagcatgattgatgacattggatcttaatgacatatgaaaaaagcagctgagacacaaaggtctaacttatttgcaagaataatttctagatgcttctgaactgacttccagcatgttaggagctccttaaacatgattttatgacgtatttggggctacctatagatttctgagtcctattattttcaatgaaatcttttcctagtcgtggcaaatcagtactgctatagttcaggagcagcacccccgggcctgagccaccttgcagctcactgtgctcgctcagtcacaaggtcagatgttccttactctcagaagtgtggtgcagacatggacattctcagggcgaccctgcaccagtttgctccttctaatttgctgaggtagaagcacagcaagctaatcctgtgacgagaatgctttcttcccaaatcagactgagctgttaccaattattatcaaaggtgaggcatggttgtggcttcagcacccatgccatttcttttaaatgtgtgattgactttggggttctgtcctatgtaatgtatagtgtaaatgccatctctgagccccacctataaggaaattctggagccacacaagtcgtctacacccagaaggctctcgttgtggtttggagttgctgtgttttattttagatttttttaatgctttagaacctttgatctctctgtctctgttctcttcctacattggcctattttcttttattgataatagtattgggttgaagttaatagaaagtgttactgagtactgtctttgtggcttggaaatctaataaaaacaataacactgcctgctttcttatctccatcctacagatttatttgttgggtagaagcttcactcacttatttgctataaataaaagatggttgggttgagaccaaagctgctaaaccacttctgtcaaatagagaaactaaagcttttgaaaagtagctggtatctatagtcattttacatgaggtaaataaatacagggttcagcattataactgaagcctttggaagacttggtgtaaaaggaaggacctttggtgatgccatctcagagagacttgagcctgcaggtattctctgacagtccagttctcaccaccaagtgcgtctcccattcctaccctaattttccatcctttctgcaactgctgactttacatctttacttttaaggaagcgttgaaaatgcctgaaagagttcagttggagagaaaaagaaaagtgaggaagggatggtagtgctaagtaggaatgttcatctatcttgtctgaagcaattgaaatattgaaggatttacaaaaatagaagaaaaaagatcagaaggttgaatacaaaaatcattgttttaacatttctggaaagtggtgttttctagatgcctatagattatcaaaacaaggcctagagtaacccaccagcctcacaagtacaaatatagatcatggagcctctctggttagcaaagtcggggagatactggataccactgcaggctcttagctgccgtgaaaaagttgaatgttctttcccctggaagttagaaatagaatgtgttcctccttaaatgtttcagagctttaggggtatatgtttgattcccttcctcatccttctccctccccaagtagcaaatcttaggaatggctcacgctcccttctttccagtcagacggtagggatggctgagctgtggagaccatgactttcccatctgggatccagaataagttaatcatagacatcatcctggtgttatcacttggtattgaaattggactgaaaatgtacatgaagtctgggaacagtctgtaaatgtctgaggtggtaagattttgactttatcagcttgtccgctaaggttgcccagaaatggcagccacttgtgagttctatctttttctttataaactgtccatattgtgctcattctgttttcttatctattattcatgctgattacttcatttccctgttctttgcctccctttggactagcatgcccaactaatttctgaaacaggtaaattgctatgattcttctggattattccatagtgaatgtgattttcattaatccatcgtggaatcaaaatggtaatactggagcctttttgttaatacttttttggggcagactcgcagctcacctcattttgcacgacatttccataatgttggctgttgaattctgtagataatgatgcatatctgcccaggaccaacactgtaggttccttgaatcctaagtggggtgggtaagctgatatttaatttttaatatttttaaatattaatgtcaacacattgatgtatgtgctaataatataaagggtaaaataaatcccttttcctcagtagtgcaaagaggagattattacaaaagacattcagatcatgacagtggcaagccttccagtagagggaaaagatcttcaaaactgtactccaccattgcagaagaggaagtgaatgcaattgggcacaggaagtcacagccaacaaatggttagagccttcgattatcatccctcactgacccgaagcttatgaactggcactaacaaaaacaaactgtaattgagtgaattctatcgtgggactgggtcagggattagtcatacaagagaggtttttggttttgtttttttctaaatctcaacaggatggtccttttatttggggcaaaaaaaatattgacttaaaaatctaaaattagaaattcttattaggaagatcaagttactttggtgacttgtccttttaaatttttgtgatcatgcaagtttatttttataattggggttaggcttcctattctcttcctttatatctttactctcctgttaggtttcaactgtggttggatcagagattcttagaatgacagagtttatatccttagagaatattggcctaatatcttacactctttcaggaaaggatcaataaaaagtcactgactcaatgcagacgttggatcatgcacatgatctttcaccctttatcattttatcaccctttagtaagaaagaaaaagtaccatttaacttgtcaaccatcaggaacaatttattccactttttaggagttgctctctgacttctgtctttcatttggccctgtagtaaattctgtaatgttctgttcaggtgagaacaatcccaagagacaaaaagaagacagatttcaaatcagctctgccctccaatgggaaattgaaggacaagtattgctgactcagagaaaaaaatgtcttttttgtgcctaaagtactcatctcttccctggttaatatattaacttcttataaacatgacttcaaaaatccgttaaaggaaatcttagtatctgtaaggaatataacatattctgatatgtgagatttctttaaaggacttctgctcttggaatgaggctcttttcttcctgttaaaccatatcaggggttaatagatgcatgtatttaggctcccagggatcaggtgtggcccagcattcaggctgtaacaccatgcccttcactgcctcccaagaaagcatttcagaatacaagttaatgggagtgaccttattatagggataccttctctttattgcaaagggataagccattcttgaattttcacactttactattgataataaacttcttatgatacacttcacagcttaacagcccaatgagttatgatacctgaagtgggaacggttctctttgagaattttctttgatataggttttaaaacaaaaaaacatctaccaactgcctgccagggacaacgtttggagcctgccttctcagccagtgccatgggctcagccacatgtgctcacttgcctggggttccggcgtatactagctaggtggcagggtgggttaaagacacctctcagagcataaagcaaagtctacaggacaagtaaggttaaaacattgtttgggctgggtagctcctgccctagagaaagccaattaagttgaccctttacttttatagagtatcctatgtagtggatttgtttatagacacatagttacaataactcctctctacaagaaagtttctctcatatggccaagaaaatctctatcttcagtcctagaaaagttacataaatgaacacctaagacatttattttctgacaagttatttttgagaatttgttaggccagaatctctgtctctatattgccccttttgttaagcatacctaaggttgcatagacgtttctggtttctggagctttacatttgaactattgttttcattgacttatatcacttgattattaacaaagcatcattaatgcaatgttccttcttcaagaggccactaaaaacactttatacaacacaaaaagagacgctccctgctacctgccgcccagtgcctattgatcatccaatgaggctttgcgttagagtaaaaagaggataaacacagagataacccaaattatagaaaagcaagaagagattctatatctgtctcagatttgttcatgacctctttagcttaaaattctcattgtgaggagctggtcaaattttgatggaactaaataggaccatcttgtatttacttttctgctttgatttcttgaaataatgacaggcattaagaagtaatttttacaggatcttcaattaaagtgattttatgcataatattttaattttgttttgttagtgccgattcctagcacttgactgtcttcacctttgagaactgcgtagcagtctgctttctgaatagttcctggttaaaaaaataacatttagcagatcaattctattaaataattgcttatactttcttttaagtcttttaagagcagctttgtttacactaaaacagccttattttcctaaagtatgtattcatgaaacaaacagaggctattgttctcaaatattgttctcaaagcatgctgcatatttttatcacgaatattatgttttgtgtggctactatattgatttgacaggtaaaatgcttaatttcttttactagaaatatttgtaagcacatttttttcatttcatattatttcctctctacatttaattataagttgtgatgttcttgtaagagtgtatcctattttcttgaagaaaatagttgattttggctttgaatgcgttgtaatggctcctgtttgtacagggcatctaagattccttttatatatcacttgcctcttccataatccaagctacagccaataaatacttggctgtgacttgcagtctgtaagccagtgctctgctctactttttccaccagactcaagttctgcttcccctaagtgagttcttgaagataaatttaacagttggcatgttgggctcttgctagaaagtataaaaaatcagggccaactactgaatactattttaaggtcatcatagtgtttttctcctggaaaatatggatgtcagtggagcttacaatggagaaaataccaaattttcatatggttctctaattctgcatttatatgcatatttcagaagctttaaaattatcacatatatgcaatgtcaaatcatcttcaagaatgacagatatcacgttcgagcctctctgtaccaattattgccactatagacagggtctgtatatacatggagtgtttgttttgaataaattacctgttcatttacttatcttctattaactttagtagtatgtaaaatagtgataaatatgtaaatagacacacgcatagagatgctccagcactcttaacaaatacttgcattgaagaagtgtttgtgaaacaattggatttttttcatcctgtataaaagcaagcattaactcaagctgcctaagaggaggtctgtctgaatttgtaaaaagtctaaatcttataaatattttaaaaataaattctagcgaggcacagtggttcacatttgtaatcccagcactttgggaggctgagtctggaggatcacttgaggccaggaatttgagaccagcctgggcaacaaatgagactctgtctatagaaaaataaaaataaaaaattagctgggtgtggtgaggaggtgcacctgtagtgtctgctactctggaagctgagacaggaggatcacttgagcccaagagtttgaggctacagtgagctatgactgcgccactgaattccagcctggacaacagagtgagactcagtatctataaatgaataaatgcttgcatgcatacatacacgcatacatacatacatacattctggagttttaagtttcaaacagacgtaattctatttagaccatcttttaatagaagcctgactaaacctacttcaatatagtcgtagtcaacatcttaattacatgcagtcaaatagatgttcccttaagggctggaaaacaaacgacaaagaacgttcgtcctacaaagttgttcacattagggatctggactaataagggtggagacgagaagaacaaatgctttgaccttcaaactcatcacattaattgcataactttaggtccttgatctcgctatgccttagttttcctgttcttgaatggtgcttacctactatactaagaacatgtcagcctggtactagtctcattatcacatgcacattcacaattggtagagtttaatcaatggaggtgaatatatttagaatgaatttctaaataaagtcgccaccatagtgaaattctttgacagccctcttgaaataatatattatttttcctcctacaacccctgagtcctggagaatttggaagcctggtgtcagtgactcaaaagaatcaacatttaggtggagactgaaggacaacctactttttgcaagaagatttctatgttggatttctttgaattttaatcatgcctgttgtaatgaccctggtctatagggttatctcagttttttatctgtgacataaacatttttggtttcttgaatttctccatttttagaaagtactcttatgtcgtatcatacaacatgagttagacccaagattgccaggaaacaaaaatattgggaagaatgaaaagcttgattatcctttaaatctaagaattagaacaaatatatttgctctgaagacaaatgagcagtgtattatatttgtttcttcccttgaacttgtagtgtatttttgagtaatttaatatagaggaacaacctattttggttttaaaacgatgaaaaatattttctagcagataccacaagaaatgctgtagtttgaggttgggtttattgtaaaatgttttcaggatgaagataatataagtcttccctactttcttttgttcttagtaattaaaggattctttgtctattagtatcaaattggttttgtgataaagagcaaaatatttattgacatttattcacctttgttctctaaacctggcttactgacagttgtgaaaggaccaaacaagtgcatttaatttttttacccaacacaaacttaaaaatagaaattgcacttcagtttgggtgacagagcaagaccctgtttctaaaaagaaaaaataatagaaatcaatgataatatttgtttgttgctttcttcccccagtttgagaatttgcctgaatctgttggacaaaaagaagtcacaatttaagaaattacgtacttttattatcagatttgaaaggtttttttcctttcagagttttgagttatttcaatttaatgtcattaactaaagatttaaatttttattgtctaaataccagcatctggctctaataccagtattggcaggagaagtactctattaggtttgcattttgactgttaggtttaatgagctttcacttcctgaaacactcttcagtgagttcaacattttagtagccagcaagataagttttttttttttttagcagaatgcaaaaatcaagtgattagaagcatcaaatgaatcctatagcttttaaaggattgatgtagtgtgttcctggttagatcattggaacttccgagtgatgaggtagctgtactcttccttcaggctggcacaaagtgtgtgggtttagtattcttagctcaagatctgtctatacaatagacaagatgaatagtatttaataatccttaatagctatgctggagtacagcatccgaaccttttcccaaggtatcatagcagtgaagccatgttctagttggaaagaacataggctttggagagacagatctagtttaaatcctggtttcaagttttacaaaacctgccttacagaaggtaattgtgaggaatagcgataataaaacagagagtgcctaacacatgacagaggctctgttccagtaatgattctcctatcgctgctttataaagcctcagtggattcttcatatttatgtgtaatcagagcaggcaacaataatggtaattcttttacctggagggtgattccaaaatggttgaatgtgtcataggcagtatttaatgctttttcactagactttaaagtatttatttcctagagggtgaaactgaggttttctgagtcacagaaaggtctgacaaagattcctgaggcctttgctgatatcctgtcccacaagcaggaatgacaagccccaaatcatctgcagaaggcatcgaatgggacatttgtccacccagcatctcctcaaagctctgtctgccctgttctctgtgctgtgtgagggggcagctatgactgaggaggtcacctggagcagaaccgcttcaaagccctcctccctcctggcatctccctccgcttccccaccatcctttcctcgggggtcctaacctcagattcttgcccacatctatgagaggttcaccctgtcatagactgtttttgtgtgtgttttctcatgttgtttctgctttgttggtttgttttacatttctgtctagagtctctaaacataatagcaagtttgtttctgagaaagttcaccctggccccctcccctcccccaaaccttcaaggctactgcatctcagcccattatcagtcaggccactggtattactttgtcagtaaactgtgcgacttccctttttatttcagtttcaaggagaagctggggccagcaggcccaggagtatcaagaacaaaagcaacggtcctccagtaaagatggccatcaaggcagcaaatctaatgactccggggaagaagcagaaaaagagtttatttttgtgtaaaggtcacccacgcagaagtcttcctgtgcagggtgctttggtagccatcagagaggaaccaagggcaacatcttttcttcccaggcgttcttctctgggtgctttattctcttctttttctttatttcgcccccacccccatcccctgccttttttttttttttttttttttttttttgtatagaaacagatccatttcttggtaatcaaagcacatttgtttggtcttcctccaaccctttgcatttgatttctaaacattccttcatatgcctttaatgaaagccagcaattatcccatgggccctacttgaatttatctgaggcagctacagattgccctgcaagatgagtttttggagataaatgaaataactggacacacactcacacaagtaacaccacagcagacctcggagtactgctaagtgtacctgtgtcaaatccgcacaggactcaatatagcaatttattcttgatgtatgcaattgcacattgtaattatattaacagagcacactaataatttgtatagattatatatattagatcttgggtatggtttttaccttctcccatggggaacttcttccttcctgatgtggaattgtacatttaaagcttggtcggtgacctttgcataccatcaacgagcacagctaagaacagagtgagagaggcccatggctgattttaccatgtgcccagattaatgtatatagttgattggaatgaggttttatgaatattcatgtttttgaaggcctttaatttctgtctgcatattagcttttaatgtgtgattttaagagagaatactttgacacctgtaaaaatcaaaatactactctttataagacatttcacaaatattcacttacattacaggctggaagtattttattcatatgtatatttataccaataaaatgattttacaagtggaa

SEQ ID NO: 393 - DNA, 49327 bp, Homo sapiens
atgctggtgatctggattctgacgctggctctccggctctgcgcgtccgttactacagtgacaccaggtgagtgctcctgggctgatgctccaggtccagtgctcctgggtggtaatagtacatgcccctgcctcaggcagcagggctgcaggtggcctcctcccctttgcatggcaaggggctgccacagggctggagacccgtgctgtgacctcatcttgctttgggggtgctgaagaggtcactgtggagacctgtgggtgcctgtggttgtgcaggggatggtctgcacacagctcctggctgaggggcggctgaaatccacagcttctgctctccaggctccccccgggaggatgaaggggcttttgtcacatagacagtcatctctgcctgccctcatcctgggggctttatctgctggagggatgggtctttccaaacctcacggaggcactgcacatgctgctagccctggtcgggagagagggagtccagaggggtgtgtgacagtatcatctcttgacttggagtagcctcaggtgcacccggggaatccccaccagttaaatggctgacggggccaggcgtggtggctcatgcttgtaatcccagcactttgggaggccaaggtgggtggatcacctgaggttgggagttcaagtccagcctggctaacatggtgaaaccccgtctctactaaaaatacaaaaattaaccaggcatggtggcgcacacctctaatcccagctacttgggaggctgaggcaggagaatcactggaacctggtaggtggagtttgcagtgaggcaagattgtggcactgcactccagcctgggcgataagagcaaaacactgccaaaaaaaaaaagagagagagaaagaaagagagaaataaagaaagaaggaaggaaagaaaaaaaagaaaggaagaaagaaagaaagaaaaggaaaaaagaaaaaatggctgccagttgcagggtctcgcctgcaatcctagcactttgggatgccgaggcaggcagatcacgaggtcaggaaattgagaccatcctagccaacatggtgaaaccccaactccaccaaaaatataaaaattagctgggcatggcctgtaatcccagcactttgggaggccgaggtgggcggatcacgaggtcaggagatcgagaccatcctggctaacacggtgaaaccccatctctactaaaaatacaaaaaattagccgggcgaggtggcgggcacctgtagtcccagctactcaaaaggctgaggcaggagaatggcgtgaacccgggaggcggagcctgcagtgagccgagatcgcgccactgcactccaacctgggcgacagcgagactccgtctcaaaaaaaaaaaattagctgggcatggtggcacacgcctgtagtctcagctactcaggaggctgaggcaggagaatcacttgaaccctggaggcagaggttgcagtgagccgagattgcactgctgcactccagcctggcaacagagcgagactctctcaaaaaaaaacaaacaaaaaagaaacaaacaaaaaaaaaacaaaccgtggctgaggggctgtaggaggagacagaggctcaggggtccttgctcagcctggtcgtggctgtgtctgagagatgactctgacccgctgatttccctcatacagaacagactttctgattcctttctggcaggggtggacagggatgaggagaggcgagagagggagaccttgagttgaaggctgtggggtgggcagaaggggtggtgagggggcaggggagctggggtgggggtctctggagccctgcaggacaccttcgaggtaacccaccagggaagttccaccatcctcccagccagggactcaggccctccgaggctgcctctgcccgccaagccttgacagatgagacctcctttacccccacccggacatgttgggagagaggtacaggcagggaggagctgatgggagagtttcaagggctggagtgacgaactctgtggatttggggacattatgagagtttattaataagacatagattccctttaagttcacctacagaagtgggaaactgtgggcctggatgggtcttaggaggggtcctccccatccctgctcccaaggcctggcctagcagatctctgtagtcagattattcaaggagagggtgatggaggtgatgacagcgatgatgaaggccccaggagtcagcaggtggcattgcctctgtgtacccagccgtgtgttagagacggcccccaagcaaccaaaaacccccgttcctcaggtgcttataattgtgtgtcaaagataacacaggtgaatcccttagtgtgcaaaacagtcagaaaaacatctatctatggccagtgcagagagcagaagggagtgaggccaggcaagtagggccactccggagggctccggaagatctgattagatccagagaccccctgccctcctcttgcagagggctctgctgttcacaaagccatttcccagcaggtagctcatataattctcatgaggagatctgtgtaaggaagtcggggcagatgaggatatgtagagactcagagagaggatgagtgatttgcctgggtccacacagcaaataatgaacacggccaccacttgacagtggatttgtgtcctgcgcccctcctcccctctagaggaccccagttctctgcacccgcgcctctccttccctagaggatcccagttctctccaccagcgctcctccacccctctagaggaacccagttctctgcaaatcatcccctgctctgggaatggattctgggtccttggggagcagttcagatgtcagatcagagacgatcagtggcatctgtagcttttttttttttttgagacagtctcctctgtcacccaggctggagtgcagtgacatgatctccactcactgcaacctctgtctccagggttcaagagattctcctgcctcagcctttggagtagctgggactacaggtgtgcgccaacatgctcagctaatttttttgtgtgtttttggtagaacagggtttcactatgttggccaggctggtcttgagctcctggcctcaagtaatctgctcagctcgaactcccaaagtgctggaatgacaggtgcgagccaccgcatctggcccagcatctgtagcttttcttcctactctctgcacgcttttctgggtactccagggcacattgtggactggtgaggttttggagaagcagacagtcgagcaagggaagagcactctgagaaggcagaaaaatcatttccacaggtctgcaggggagctacggtgcaggaatgccctgaaagatgagggggcatctgctggatggagcgtgatgtttgctggggagagtgtggtggtgctggtgcatttgtggatgacaggagcagtaagaccaagctaagatatttagacatcacaggaacctctgtgggctgagtagggctggggatgcctctgtagggcagaccagcatcagagaggccattgagaggcacccaaagctatcctgggaggaggacatgaaggcccagctgagaacccaactcccctggaaatgggggctccacttgatggttggctgggggacgtggagatagatggtctaggaggctgtgttaactgggagaggagcctctttttgctggatgacaaaggtctccagttgaggctgtggagtttggggtgatggtgaaatttctgagtggagctgtcctgggcttctaggatgggtccagtgccattgccccagcccctactacaggctgaggaggtatgaaaatgtgagtgctcaccacgaactaaatcagccggcaccttggtcttgaactttgcagcctccagaactgtgagaaataaatctatttttttaaatttattttaagagatgggggtcttgctttgttgcccaggctggtcttgaactcctgggctcaaaccatcctcccacctcaacttcctaaagtgcaggaactacaggcaggagccaccacacctggccaatttctattgtttaagcaacccagtcaatggtatttgctatggcagcccaagatgactaagacaggctgccttcaagattttctcttcatcagctgggtgtagtggttcatgcctataatcccagtgctttgggaggccccagcctgggcaatgtagtgacaccccatctctaaaaaaaaaaaaaaattaggctgggtgtggtgctcatgcctgtaatcccagcaccttgggaggccaaggcaggaggatcccttaagcccaggagttcgagaccagctcgggcaacatagggagaccccatctcttaaaaaaaaaaattagccagtcatagtggtgcatgcctatagtcttagctacttggaaggctgaggggagaggatctcttgagtccaggaattcgagactgcagtgagctgtgattgcaccattacgcttcagcctgggtgacagagtgaggccctgtctcagaaaaagcttttctctatttatctttggttttcaggaatttgacccagactataatgtctgtggtttgtggccctttgtttatttttggaaattcttagtgattattgtcttcaaatatttctcctgccctgttctctctctcttctccttctgagactacaatgagatgtatgttaggccattccatattggactacagctcttggatactgttctgcacacatccccaccacccctttctgtgtttcagtttggataatttctattgacttatcaattgactgaagataaaaactgacttattttcagtttttattgacttatcttcactaattctttcctctactgtgtcttatctgctgatcatcctgttgaaaagaagtctttggccaggtgcagtgggtcacaactgtaatcccagcactttgggaggctgaggtgggaggattgtttgagctcaggagtttgaggccagactgagcaacatagggagaccctgtctctgcaaaaaataccagaaaaaaattagctgtgtgtggtggtgtgcgcctgtagtcccagctacttgggaggctgagataggaggaatgcttgagcccaggaggtcgagactgcagtgagctgtgattgtgccactgcattccagcctgggcaacagagagagaccttgtctcaaataataataataataataaatttaaaaatcagaaaagaactctttatctctgatattatggtttttatttctaccatcttcgtttgaaagaggcctcttgagaggcaccgagagccaccctggaataggagatggacagtccaggaggctgtattgaccgggaggacaggagcctctctttggtggaagacaagggtctccagttgggcctgttgagtgtggaatgactgtggggtttctgggaggagctgtcctggtggcctgaggctcctggaatggggacacagtctagaattctaccttttccaactgctgcagaggacacaaaagccagaaaatgccagaaaaatgccagggatccacacgatgactggaaccactatcctgttttatgtacatgaagttgcacagtgttcctaataagggtcgaggaggggatgggctaggggagagggaccaactgtctgccctggaggggcggggccaggggtctgaaggggtcagcgctctttagcttagaaaggtgaagctgggggtggaaatggttaacacctataaaattgggaagagagtggtggaggtgagaacagattgcttcacaatagacaaaggggcaacctttgaaactcaagtgatgtaaaaattgacgcaattacaaggaatgcagttttatacaaagagtaataaacttattcagcaaacaccaaaggctggctctgcttgagcaggtgctctggataaggcagggtgaataaacagtttatagtagagttaatgaggtgggattggggcagaaaggccacagcccaatctgctgctggagctacgagagggggcctccggggcccttccacctgggctgatgagggtacagggagaggcagcatttgagtttggtggtagttgagtaggacaggaaggaagtattatattaacagatgctcaaaggccttagacaaattcagaactgcattgtctgaacttccacagagctagggagagaattgggatattggtaatcagattccctcgggaagatcaaatcttggggtggtagtgggatgagctggggtcacccataactatttggggtgtggaaaggccaagagacacccacaccacagttggagaagtcaatagagacccgatagtctgagtatcatattaatattaaaaatgggccaggcatggtggctcactcatgcctgtaatcccagcactttgggagaccgaggtgggaggatcgcttgagggcaggagtttgagactagcctgggcaaaaatattttttcaataaaaaagttagctgggtgtggtggtgtgtctctgtagtcccagctgctcaggaggctgaggggagaggatctcctgaatctagcaattccaggctgcagtgagctaggatcacaccactgcaacccagcctgggtgacagagcaagacattacctcttaaaaataaaaaaatatatatatgtattaaaaattgcaaatattcggccaggcgtggtggctcatgcctgtaatcccagcactttgggaggtcgaggcggatggatgacaaggtcaggagatcgagaccatcctggctgacacagtgaaatcccgtctctactaaaaataaaaaaattagccgggcatggtggtgtgtgcctgtagtcccagctacttgggaggctgaggcagaagaatggcgtgaacccaggaagtggagattgcagtgagctgagatagtgccactgcactccagcctgggcgacagagcgagactctttataaaaaaaaaaaaatgcaaatattcattgagggtttgctatgtgctggacacttttataatattatctcatttaacttttacaacattcctaagaagaaggatgtgttactgattttgggtttttatacgtggggaaacaggcacagagatgataaataatttgctcggtggggcgtggtgtctcacgcctgtaatcccaacactttgggaggtcaaggcaggcagatcacgtgacatcgggagttcgagaccagcctggccaacatggtgaaaccccatctctactaaaagtacaaaaattaactgggcatggtggcaggttcctgtaatcccagctactcaggagactgacgcaggagaatcacttgaaccctggaggcagaggttgcagtgagccgagatcgtgacactgcgctccagccttggtgacagaccaagactccatctcaaaaaaaaaaaaaaaaaaaaaaaaaaaaaaaagaaattgctcaataccacccattcatcagttggaggagtcaggatttgaacctaagctttccagctccagggtccccattttttaccacttgctataattggggatgcctgtgtgtatgtgttccctaggtctgccacaataaattaacaaacactattggtggcttcaagcaacataaatttattctcttacagttgtggacgccagaagcttgaagtcaaggtcatcatgagtgccacattcccttcaaactctctagaggaagatctctccttgccttctctagcttttttttttttttgagacggagtgtctttctgttgcccaggctggagtacagtggtgcgatctcgcctcactgcaacctctgcctcccggttcaagcaattctcctgcctcagccttctgagtagctgggattacaggcacgcgccaccacgcccggctaagttttgtatttttagtagagacggggtttcaccatgtcggtcaggctggtctcgaactcctgacctcgtgatccacccaccttggcctcccgaagtgctgggattacaggcataagccaccgtgcctggccagcttcttcctttttaaaaaaatgtttatctcgttatttagaggctggattatgagactggctaatttttgtatttttttttcttgtagagacggggtcttgctatgttgcccaggctgatctcaaactcctgggctcaagcaatccactggcctcggcctctcaaagtgctgggattacaagcgtgagccaccgtgcctggccagccttttctagctcctgttgacgcctggtgttccttggcttgtgataacatcactccgatctctgcctcatcgtctttgggcatctttcctgtacgtcacacctctctctcttttctctgacaagtatgcagatttagggcccatcctaaatctgatcttgagatccttgacttaatgacatctggaaagcccctgtttccaaagaaggtcgcgttcccaggtaccaggagttaggacttcgaggatatattttggggtgatcctattcaatgcgcgataccatgctttagcctcaactggtggctcttgcttttaagaagcagtgacagtgcctgctggcactagaaagccaagaagtccatccaccgccattggtgtgtgcaggggttggggtggccccagctctatctctacctctacaactcagccaggagccaatgagcttatgttaaaggaatagacccaggctatctagctcttgtgtggcagagcagaatgtgcacctagaactgggggaccccagctcatcccagtgcctcccataacattgtagaatattctagagtgatcagggtggcaagaacaggcatcatttactctcattttcgagggagaaatggaagttcagagaggttcgctggattgcacaaggtcacacagcggtgtacaggttggtcttggagacatagcaaggaccctccctccacaccccgtgggggctccccacactgccactgcctcttcaggggagctgccactggggacttcattgactgattttgtcacaagcagaaatatgtcctggaggtggcaggaggagacagtttcaaagcttggtgatggtcttcagacttgtccttgaagaaccttctaatgtgtgtccccaagcatgccacgatgtgaaaggtttgcctgaaaaaccagctgccttaattaaataataatctattttattttagagacagcgtctttctctgttgcccaggctggagtgcagtggcacaatcatagctcactgcagccttgacctcctgggctcaagtgagccttctgcctcagcctctcaagtagctgggactacagatgtgcaccaccatgcccagctaatttttaaatgtttgtacagatgggggtctcgctatgttttccaggctggtcttgaactcctggcctcaagcaaacctcctgcctcagcctcccaaagtgctgggattacaggtgtgagccattgtccctaaccttaatctttttaaagaaaaatccaaatacatgtggaatgtagaagcagtaaacactgtaaatgggcaagaaaggactcaacttaattcatttaatgagataccatgtcattactctcacagagaaaaaagctaccaaactttacctgcttagcaggagagggagctggcatctttaatgaccagtggctgcaatgtaggcaaataggcaatttttgttaagcattttgactacaaaggtctggggagtgccagcttggaaattgttaccagtgaatgattttccatgggttctccaaggggtgacataaggcatacctataataaaataaaataaaacagaataaaataaagcaaaataaaataaaataaaataaaataaaatgtatataggcagggcacggtggctcatgcctgcaatctcagcactttgggagaccaaggcaggcagatcgcgaggtcaagagatcgagaccatcctggccaacatggtgaaaccccatctctactaaaaatacattagctgagcctactggcaggggcctgtagtcccagctactcaggaggctgaggcaggagaatcgcttgaacctgggagacagaggttgcagtgagccaagatcacgccactgcgctccagcctgggtaacagagcaagactccttctcaaaaaaataaaaataaagtaaaataacatgtatatatatataacatatatacatgtacacacatacatttatatattcacacacatttattgtgttttaaaaattataaaacgaggggtggtggtgcaggtctgtagccccagtactcaggagggagggaggatcacttgagcccaggagttccaggcgcagtgagctaggatctcaccactgcgctccagtctgggggcacattgagaactcgcctctctctcttttttttttttcgttgttgttgttttgttttttagatgagtctcgctctgttgcccaggctggagtgcagtggtgccatctcggctcactgcaacctccacctcccaagttcaagtgattcccctgcctcagcctcccgagtagctgggtctataggtgtgccaccacactcagctaaatttttgtatttttagtagagatggagtttcaccatgttggccaggatggtcttgatctcttgacctcgtgatcccgcccgccttggcctcccaaagtcctgggattacaggcgtgagccaccatgcccagcctgaagaaatacccccttaaccttaacattcagataaacattgttaacattttatttctatgtatttagatttattctatggatggtttatattttaatggctgattactattctgttctatggaacaccacagtcatataaccagtcccctatttgtctattcttggacatgtgtacctctgttttttactataataagtaacgaggcaataaacattcttgtataaattttattttatatctgcatcagattaatttaggatgaataactaggaatgtcatcgttaaaatgatatcagcagctgggtgtggtggctcatgcctgtaattccagtgccttgggaggctgaggtgggacaatcactggaggttgggagttgagactagcctgggcaagatagtgagaccccatctctacaaaacgtaaaaaattagctgagtatggtggggcctgtggtctcaggtactctggaggctgaggtgggaggatcacttgagcccaggagtttgaggctgcagtgagctaaggttgtgccactgcactccagcctgggttacagagtgagacccccaactcctgaaaaaaaaaatggtatgactcttccaatggtccctgatgcatattttcaaattatcctttagaactatgatgccaagtcaacatcacatgaaaaggccccaaccaacactagctactatagtcatctatcatgatggacgtctatctttgactgacaaagaagaaatcatattttgctgtgttttggatttctttgcttcctggtgaaatttatatgctttttccttctcttgggcttgttggctatttgagtttctttggagaagaagctcagttttcctttgcctagcttccttgtggagcaccctgaccctggaggttgaactggagaaggaccgccgcacttgctctgtgacatcctttggggacaccgttgccaccagaatcccaggttgggaggggtctgaatctcttcacccagagcatggttcccttgtccctcctgcagcgagtgaagaacctgggcttggtggagtttgctagcccaggggacgacggggatggcagagccgagggctttagcctggggctcccacttagtgagcaggcaagggctgcaggagccagagagaaggagcgtcaggaggtgagggtgtcctaggaactgaatgtgagatttcagaaagaggaagggcagctggataagatggatggggattcggtcacttagagctcaagcttggtgtgacctgcgagggcaactgttgtggagatgtgagtggttaaggacaaactgaatggtaacaaatcggagagaaaatggtatgaatccaggaacaaaggcaaaagagagcaggtatgttcggaatggtcccccgcattccacagtgtccctgccttctttgggtccctcagtggcccaccatgtcactgccttggcctcaccagcctctgtccctccattgccccttctccttgtggcttccagggcacagctgctgctgcttttttttttttttttttgagacggagtctcactttattgtccagactggagtgcagtggtgcgatctcagctcactgcaacctatgcctcccgggttcaagcgattctcctgcctcagcctccggagtagctgggactacaggtgcccgccaccatgcccggccaatttttatatttttagtagagatgaggtttcaccgtgttggccaggctggtctcgaactcctgacctcaggtgatctgcctgccttggtctcccaaaatgctgggattacaggcgtgagccaccgtgcccagcctccagggcacagcttctaaggcacagttgggatcatggctttttactgaacttagtcaagtccaaaccccatttctaggctggttcacacccattttcctagcttccctctgccttactgtcttccctcaccccaaacagacagtgagcacttttactcacctctgggaccccacacatggtgttcttctgccctgaaaaccttccctttctcctctttattcctctagccctttattggggctaaaagtaaaagtcatttttcttttcttttctttttttttttttagaaacagggtcttgctctgttgcccaggctggagtgcagcggcctaatcatagctcagtacagccctgaattcctgggctccagtgatcctcccacctcagcctcccaagtagctgagactacagggacacagcaccacgcctgactaattttttgttgagatggggtctcattatattgcccagactgatctcaaactcctgggttcaagtagtcctccccccttggcctcccaaagtgctgggattacaggcatgagctgccacatctggcctttttgttttgttttctttgagatagggtctttctctgttacccaagctggagtgcagtggtgcaatcatagctcactgcagccttgagctcctgggctcaagcaattgtcctgcctcaacctcctgagtacctggaactgactacaggtgcatgtaccacactgggctaatatttaaaatttttttgtaaagacaggatcttgatatgttgcccaggttggtcttgaactcctggcctcaactaatcttcccaccttggcctcccaaaatgctgggattacaggtatgagccaccacacctggtcaaaagccatctttagaatgtgcttgaattctatgttataatctgagtgaccttggaaattatttatccttagaaccttgattcctatgtaaaatagaaatagcggctgggtgctgtggctcacacctgtaatcccagcactttaggaggccaaggcgggtggatcatgtgaggtcaggagttcaagaccagcctgtccaacatggcaaaaccacgtctctaataaaaatacaaaaagtagccgggtacagtggtgggcacctgtaatcccagcaacttgggaggctgaggcaggagaattgcttgagtccgggagatggaggttgcagtgagccgagatcctgccagtgcactccagcctgggcaacagagcgagactccgttaaaaaaaaaaaaaaaagaaatagccatgtccaccttgcagacttgttgtgatgttgtgatgtttatatttggtaactaagaaaaagcaggctttagacttcccagcatgcactgactcattcactgagaaagtctaattaagcctctacagggccaactgaacagggcagaaatgttctctaccctcacggagttcacagcctacaagggcaaagacattcctaggcagttacagaatcactgagttccagttaatgtgtcctgtgatagggcgagtacaggaatctgctctgtacccaataaatgccagctctccccacccctgttcatacctcatgagtcgttatggagataaccataaacgtcctttatatgctttttcattgtttgacttgtgacaatagacacattctacttttataacgtaaaaattccagtaaaatttatgagtaaacccaagagactcccatttttaaaagaagaaggaaaaaatgacaaatcaagtatcacctcctcctggaagcctcccttgatgacaggcaggaaagtccaccctgctgcattgagccctgccctgccttcatgtgggcctctgctgtctcctcgttgtactgagggtctaggagcccccatgaggggcggggggtacatctacctttgatctcagtgttaccagatggcaccatgctcttggtgtcccaaacaaagaattggatatgacacatacaaatagcaaagcaagcagcaaaagtttgttacgtatagtattacactctcaaagaggggagagcggactgatctctgtgaggtgagatcagcatcagtttggtgtactttgcatctttttttttttttttttgacagagtctcgctgtgtcacccaggctagagtacagtggcatgatcttggatcactgcaacctctgcctcctgggttcaggcgattctcctgccccagccgcccaaggagctgggattacaggcgcccaccaccatacccggctaatttttatatttttagtagaaacaaggtttcaccacgttggccaggctggcctcgaactcctgacctcaggtgatcctcctgccttggcctcccaaagtgctgggattacagttgtgagccaccatgcccgaccacttttcatctttttatgtgtttttgtttttttttaacttctcttcccaaggccgtctaatctctagccagcatctgccttttgattgataggtgtgtcatttagttactttggcctttgtgtgcttgcgcatcgcctccatctcataatcttaagtccaggcatgatatgcagtccacgtaggtgagctgtaatgagctgattatgatacagggttatgttaaagatactttttctctctaacggacatgcctagcactgaggagctaccccttactggtttggtctggatcttgctggccgtgggatctcctttttatttttttgggatggagtctcactctgttgctcaggctggagtgcagtggctcacgatctcggctcactgcaacctctgcctcttgggttcaagagattctcctgcctcagcctcctgagtagctgggattacaggcacccgccaccacgcctggctaatttttgtatttttagtagagatggggtttcaccatgttggccaggctggtctcaaactcctgaccttaggtgattgagggccttccaaagtgctgggattacaagcatgagccactgcacctggccaaggggagcagagttttaaaggataacttggtgggttgggggagccagtgagtcaggagtgctgattgcaaagggatgaaatcacagggagtcgaagctgtcttcttgcactgagtcagttcctgggtgggggccacaagatcagctgagccagtttgtccatctgggtggtgccagctgatccatcaagtgcggggtctgcaaaatatctcaagcactgattttaggagcagtttagggagggtcaaaaatcttatagcctccagctgcatggctcctaaaccatcatttctaatcttgtggctaatgttagtcctaccaaggcaatctagtccccaggcaagaagaaagtctgctttgggaaagggctgttaccatctttgtttcttccaaagttagttcagcctactcccaagaatgaacaaggacagcttggaggttagaagcaaggtggagccagttatgtgagatctctttcactgtctcagtcataattttgcaaaggcggtttcagctggagggctgagttttcctgtgggtgcagaaaggcagggtggctgaggattgtggtggcctctggacgagacacagaggaggttcttgagaggtgattggggaaggtgacctcagagaccaggaggccagaggggtccctcactcaagtgagggaggaagcctgtgggaaggaacgcctgcgtgagcctgttttgaaccctgccaccctcactttggtgccggcctatcctctgccatcctctctgacccttgtattcagggctcagagatgccccacctccaccttggcagcccctggagctcagcccctccacttccatcaggttgaactagacaaaacttagctcataaacgagaggattgggcaaaaccacaaaagtccaccgacttcaaaacaaacatgtggccggtgtgtgcctcaagcctgtaatcccagccctttgggaggccgaggtgtgagaatcacttgaggccagaagtttgagactggcctgggcaacatagcaagatcccatctctaaaaaaaacaaaattttaaaattagtggggcatggtggcacacccctgtagccccaacgatttgggaggctgaggcaggaggatcgctccagcctagaagtttgaggctgcagttactccagcctagaagtaggatggtgatatagtttgaatatttatcccttcccagatctcatgttgaactgtaattcccagcccaggtaacagagtgagaccctgtctcaaaaaaaaaaaagaaaaaaaaagccatcaaaaccccaaaatctcccccaaacaccaagcaatcttttccatctttttcatgaagttagaattccaaaaaatcttaggcatcattgcctttcacctgaactgcactgatcaatgatttgatagtgctctgtctacccctgcaccccggccttccgtcttggtccagctcctagcctctccctgtgactgtgtgtctttttcatgactcggtaaaactggggccatctgggatggcagagggtgcctctgctctggaggactgaaccgtctcctctgccaggggccaaggttggccttcctgagacaagtgagaaaaatgcagctcctggcatctcggagattgacagatgggacaagaggccacacaccctgtcctctcaaggaagtcccttatatgtcatcctgtagaattcctagtaactcctgggctggtggcacttccatcacagattctgtgcatatacaatctgattcatttcataggcaggatgaagaaagccagggattatatgtccgtcttacataggaaaatggaatcctacacgtactgtcccatgttctaagtggcacagagaaaatacagtagcccctccagtccagggccaagataatggttttttttttttttttttttttttgagacagagtctcgctctgtcacccaggctggagtgcaatggtgcaatctcggctcaccgcaacctctgcctccctggttcaagcgactctcctgtctcagcctcccaagtagctgggattacaggcgcatgctaccatgcctggctaatttttgtatttttagtagggatggggtttcaccatattggccaggctggtcttggactcctgacctcaagtgatctgcctgcctcagcctcccaaagtgctgggattatgggtgtgagtcactgcacccagcctagctaatgattttttttacagttgtagccctttgagtgggcctgaaccagggtgcaggaggcactccatgggcaggctacgagggctgcaggatgaccaggtagagggggcagtgttccaagaagggtgatgctagcctttgaatatttgtcctcacccaaatctcatgttgagttgtaatccccagtgttgcaggaggggccttgtgggagttgtttggataatgggggcagatccctgttgaatggcttggaccatccccttggtgatgagtgagctctcattctgagttcacacaagatctggtcttttagaagtgtgtgggccaggcgcggtggctcgcgcctgtaatcccagcactttgggaggccgaggtgagcaggtcacctgaggtcaggagtttgagaccagcctgaccaacatggagaaaccccacctctactaaaatacaaaattagccaggcatagtggtgcatgcctgtaatcccagctacttgggaggctgaggcaggagaatcacttgaactggggaggcagatggtgcggtgagccaagatcacgccactgcactccagcctgggcaacaagagtgaaactacgtctaaaaaaaaaaaaagaaaagaaaagaaaaaaaagaagtgtgtggcattggctgggcttggtggctcacgcctgtaatcccagcactctgagaggccaaggcaggcagatcatttgaggttaggagttcgagatctgcctggccatcatggtgaaactgtctctactaaaaatacaaaaattagccgggtgcagtggtgggtgcctgtaatcccagctactcaggaggctgtcaggagaatcacttgaacccaggaggcggaggttgcaatgagccgagatcgcgccaatgcactccagcctgggtgacaggctgtcccagaaaaaaaaaaaaaaaaaaaaaagaaagaaagaaatgtgtggcacctcccctaccctctttgcctctcttgctcctgcttttgccatgtgaccagcctgctctcccttcaccttctgccatgattggaagcttcctgaggcctccctagaagcaaacaccagcaccatccttcctgtacggcctgcagaactgtgagccaattaaatctctttgctttataaatgacccaggcttacgtatttctttatagcaatgcaggaaaggcctaatagaggtggctagctcttgtgtatgtaaatgcatctggagagaaaggacagagataattgtccatggaacgggtgactgccttagctcttctgtttttcctgggttggtggcagctgcagggttagaggtcaaaggggtctctcagatgtcaaggatgaggaagagagacttgtcagaccagatatggtttggctgtgtccccactcaaatctcatcttgaattgtagctcccacaattcccatgtgttgtggtgttgtgggagggacccagtgggagataattgaatcattgggggcagtttcccccatactgttcttgtggtaatgaataagtaagtctcacgagatctgatggttttataaagggaaacccctttcacttggctctcattctctctcttgcctgctgccaagtaagatgtgcctttcaccttccaccatgattgtgaggcctccccagacatgtggaactgtgagtccattaaaccattttttctgtataaattacccagtctctggtatgtcttcttcctcttcttctttttttttttttttttttgagacagagtctcactctgtcacccaggctggagtgcagtggtgcgatctcagctcactgcaacctcgcaacctctgcctcctgggttcaagtgattctcctgcctcagcctcccaagtagctgggattacaggtgcctgccaccacacccggctaatttttgtatttttagtagagatgagtttcacaatgatgcctaggctcatctcgaactcctgacctcaagtgatctgccacctcggcatcccaaagtgctaggattataggcatgagccaccacacctggccttgggtatgtttttatcagcagtgtgaaaatggacaagtatgatgtgtaaaccagacaatataaggtctgcaaaatgcagaatgtgaggaacaaaaggaacgcgtgtgggggcatttgtgggagtacaaccttctgctggaattgatgcctgagcaccttgatagatgaacatgtcccagtgtggctagggtggaaagagcaggcaatactggacagaggcatataagtacagttctccacaaccatacagatatgaaaacccagagccatactactaacaattcaagttcattttttttttttagatggtgtctcactctttcaccaggctggagtgcagtgtcatgatctcagctcactgcaacctccacctcctgggttcaagcgattctcatgccctagcctcccaagtagatgggattacaggtgtacaccaccacacctggctaatttttttgtatttttaatagagatggggtttcactatgttggccaaactggtctcaaactcctgatctcaagtgatccacccacctcggcctcccaaagtgttgggattataggtgggagccacctcacctggccctaaaaattcaagttacaaattacagtcaagactcagaaaagtatctagtgacaccctgcccgctagccaaatggttatattccacagaaggcacaagggtctataacaggggtccccaaccccctggccccagaccagaactggtccgtggcctgtcaggaaccaggacacacggcaagaagtgagtagcgggccagcgaagctgagctctgcctcttgtcggatcaggagcggcatgagattcttccaggaggactaaccctgctgtgaactgtgcatgcaagggatttaggctgcacccccttatgagaatctaacggtaaatgtaatgtgcttgaatcatcccaaaaccattcccccaatagccaacagctcaagtccttgggaaattgtcttagatgaaatcggtgcctggtgccaaaaaggttggggactgctagtctacaccatcaataaaatttcttcaaatctacaggttcaactgacacttcctatgcccccaaaagggaaacttgagtttcaataccatgggctgaccaggtgtcttccagcccggatgtgtcagaattgactgccaccaaacatgaggagacagtcataaatcatagcactttctctggtttctctcaaatcacaggctcaacagtaaacaccagtattggaggtaatacaacttctgcatccacacccagttcaagcgacccttttaccacctttagtgactatggggtgtcagtcacatttatcacgggctcaactgcaacaaaacacttccttgacagctccacaaactcaggccacagtgaggaatcaacagtatcccacagcggcccaggtgcaactggaacaacactcttcccttcccactctgcaacctcagtttttgttggagaacctaaaacctcacccatcacttcagcctcaatggaaacaacagcgttacctggcagtaccacaacagcaggcctgagtgagaaatctaccaccttctacagtagccccagatcaccagacagaacactctcacctgcccgcacgacaagctcaggcgtcagtgaaaaatcaaccacctcccacagccgaccaggcccaacgcacacaatagcgttccctgacagtaccaccatgccaggcgtcagtcaggaatctacagcttcccacagcatccccggctccacagacacaacactgtcccctggcactaccacaccatcatcccttggtccagaatctactaccttccacagcagcccaggctacactaaaacaacacgcttacctgacaacaccacaacctcaggcctccttgaagcatctacgcccgtccacagcagcactggatcgccacacacaacactgtccccttccagctctacaacccatgagggagaacctaccaccttccagagctggccaagctcaaaggacacttcgcctgcaccttctggtaccacatcagcctttgttaaactatctacaacttatcacagcagcccgagctcaactccaacaacccacttttctgccagctccacaaccttgggccatagtgaggaatcgacaccagtccacagcagcccagttgcaactgcaacaacacccccacctgcccgctccgcgacctcaggccatgttgaagaatctacagcctaccacaggagcccgggctcaactcaaacaatgcacttccctgaaagctccacaacttcaggccatagtgaagaatcagcaactttccacggcagcacaacacacacaaaatcttcaactcctagcaccacagctgccctagcacatacaagctaccacagcagcctgggctcaactgaaacaacacacttccgtgatagctccacaatctcaggccgtagtgaggaatcaaaagcatcccacagcagcccagatgcaatggcaacaacagtcttacctgccggctctacaccctcagttcttgttggagactcgacgccctcacccatcagttcaggctcaatggaaaccacagcgttacccggcagtaccacaaaaccaggcctcagtgagaaatctaccactttctacagtagccccagatcaccagacacaacacacttacctgccagcatgacaagctcaggcgtcagtgaagaatccaccacctcccacagccgaccaggctcaacacacacaacagcattccctggcagtaccaccatgccaggcctcagtcaggaatctacagcttcccacagcagcccaggccccacagacacaacattgtcccctggcagtaccacagcatcatcccttggtccagaatatactaccttccacagccgcccaggctccactgaaacaacactcttacctgacaacaccacagcctcaggactccttgaagcatctatgcccgtccacagcagcaccagatcgccacacacaacactgtcccctgccggctctacaacccgtcagggagaatctaccacattccatagctggccaagctcaaaggacactaggcctgcacctcctactaccacatcagcctttgttgagccatctacaacctcccacggcagcccgagctcaattccaacaacccacatttctgcccgctccacaacctcaggcctcgttgaagaatctacgacctaccacagcagcccgggctcaactcaaacaatgcacttccctgaaagcgacacaacttcaggccgtggtgaagaatcaacaacttcccacagcagcacaacacacacaatatcttcagctcctagcaccacatctgcccttgttgaagaacctaccagctaccacagcagcccgggctcaactgcaacaacacacttccctgacagctccacaacctcaggccgtagtgaggaatcaacagcatcgcacagcagccaagacgcaacgggaacaatagtcctacctgcccgctccacaacctcagttcttcttggagaatctacgacctcacccatcagttcaggctcaatggaaacgacagcgttacccggcagtaccacaacgccaggcctcagtgagagatctaccactttccatagtagccccagatcaccagccacaacactctcacctgccagcacgacaagctcaggcgtcagtgaagaatccaccacctcccgcagccgaccaggctcaacgcacacaacagcattccctgacagcaccaccacgccaggcctcagtcggcattctacaacttcccacagcagcccaggctcaacggatacaacactgttacctgccagcaccaccacctcaggccccagtcaggaatcaacaacttcccacagcagctcaggttcaactgacacagcactgtcccctggcagtaccacagccttatcctttggtcaagaatctacaaccttccacagcaacccaggctccactcacacaacactcttccctgacagcaccacaagctcaggcatcgttgaagcatctacacgcgtccacagcagcactggctcaccacgcacaacactgtcccctgccagctccacaagccctggacttcagggagaatctactgccttccagacccacccagcctcaactcacacaacgccttcacctcctagcaccgcaacagcccctgttgaagaatctacaacctaccaccgcagcccaggctcgactccaacaacacacttccctgccagctccacaacttcgggccacagtgagaaatcaacaatattccacagcagcccagatgcaagtggaacaacaccctcatctgcccactccacaacctcaggtcgtggagaatctacaacctcacgcatcagtccaggctcaactgaaataacaacgttacctggcagtaccacaacaccaggcctcagtgaggcatctaccaccttctacagcagccccagatcaccaaccacaacactctcacctgccagcatgacaagcctgggcgtcggtgaagaatccaccacctcccgtagccaaccaggttctactcactcaacagtgtcacctgccagcaccaccacgccaggcctcagtgaggaatctaccaccgtctacagcagcagccgaggctcaactgaaaccacagtgttccctcacagcaccacaacctcagttcatggtgaagagcctacaaccttccacagccggccagcctcaactcacacaacactgttcactgaggacagcaccacctcgggcctcactgaagaatctacagccttccccggcagcccagcctccacccaaacagggttacctgccacactcacaaccgcagacctcggtgaggaatcaactacctttcccagcagctcaggctcaactggaacaaaactctcacctgcccgctccaccacctctggcctcgttggagaatccacaccctcacgcctcagtccaagctcaaccgaaacaacaactttacctggcagtcccacaacaccaagcctcagtgagaaatcaaccaccttctacactagccccagatcaccagatgcaacactctcacctgcaaccacaacaagctcaggcgtcagcgaagaatccagcacatcccacagtcaaccaggctcaacgcacacaacagcattccctgacagcaccaccacctcagacctcagtcaggaacctacaacttcccacagcagccaaggctcaacagaggcaacactgtcccctggcagtaccacagcctcatcccttggtcaacaatctacaaccttccacagcagcccaggcgacactgaaaccacactcttacctgacgacaccataacctcaggcctcgtggaggcatctacacccacccacagcagcactggctcgctacacacaacactgacccctgccagctccacaagcgctggccttcaggaagaatctaccactttccagagctggccaagctcaagtgacacaacaccttcacctcccggcaccacagcagcccctgttgaagtatccacaacctaccacagccgcccgagctcaactccaacaacacacttttctgccagttccacaaccttgggccgtagtgaggaatcaacaacagtccacagcagcccaggtgcaactggaacagcactcttccctacccgctctgcaacctcagttcttgttggagaacctacaacgtcacccatcagttcaggctcaacggaaacaacagcgttacctggcagtaccacaacagcaggcctgagtgagaaatctaccaccttctacagtagccccagatcaccggacacaacactctcacctgccagcacgacaagctcaggcgtcagtgaagaatccaccacctcccacagccgaccaggctcaacgcacacaacagcattccctggcagtaccaccatgccaggcgtcagtcaggaatctacagcttcccacagcagcccaggctccacagacacaacattgtcccctggcagtaccacagcatcatcccttggtccagaatctactactttccacagcagcccaggctccactgaaacaacactcttacctgacaacaccacagcctcaggcctccttgaagcatctacgcccgtccacagcagcactggatcgccacacacaacactgtcccctgccggctctacaacacgtcagggagaatctaccaccttccagagctggccaagctcaaaggacactatgcctgcacctcctactaccacatcagcctttgttgagctatctacaacctcccacggcagcccgagctcaactccaacaacccacttttctgccagctccacaaccttgggccgtagtgaggaatcgacaacagtccacagcagcccagttgcaactgcaacaacaccctcgcctgcccgctccacaacctcaggcctcgttgaagaatctacggcgtaccacagcagcccgggctcaactcaaacaatgcacttccctgaaagctccacagcttcaggtcgtagtgaagaatcaagaacttcccacagcagcacaacacacacaatatcttcacctcctagcaccacatctgcccttgttgaagaacctaccagctaccacagcagcccgggctcaactgcaacaacacacttccctgacagctccacaacctcaggccgtagtgaggaatcaacagcatcccacagcagccaagacgcaacgggaacaatagtcctacctgcccgctccacaacctcagttcttcttggagaatctacgacctcacccatcagttcaggctcaatggaaacgacagcgttacccggcagtaccacaacgccaggcctcagtgagaaatctaccactttccacagtagccccagatcaccagccacaacactctcacctgccagcacgacaagctcaggcgtcagtgaagaatccaccacctcccacagccgaccaggctcaacgcacacaacagcattccctgacagcaccaccacgccaggcctcagtcggcattctacaacttcccacagcagcccaggctcaacggatacaacactgttacctgccagcaccaccacctcaggccccagtcaggaatcaacaacttcccacagcagcccaggttcaactgacacagcactgtcccctggcagtaccacagccttatcctttggtcaagaatctacaaccttccacagcagcccaggctccactcacacaacgctcttccctgacagcaccacaagctcaggcatcgttgaagcatctacacgcgtccacagcagcactggctcaccacgcacaacactgtcccctgccagctccacaagccctggacttcagggagaatctaccgccttccagacccacccagcctcaactcacacgacgccttcacctcctagcaccgcaacagcccctgttgaagaatctacaacctaccaccgcagcccaggctcgactccaacaacacacttccctgccagctccacaacttcgggccacagtgagaaatcaacaatattccacagcagcccagatgcaagtggaacaacaccctcatctgcccactccacaacctcaggtcgtggagaatctacaacctcacgcatcagtccaggctcaactgaaataacaacgttacctggcagtaccacaacaccaggcctcagtgaggcatctaccaccttctacagcagccccagatcaccaaccacaacactctcacctgccagtatgacaagcctaggcgtcggtgaagaatccaccacctcccgtagccaaccaggttctactcactcaacagtgtcacctgccagcaccaccacgccaggcctcagtgaggaatctaccaccgtctacagcagcagcccaggctcaactgaaaccacagtgttccctcgcacccccacaacctcagttcgtggtgaagagcctacaaccttccacagccggccagcctcaactcacacaacactgttcactgaggacagcaccacctcgggcctcactgaagaatctacagccttccccggcagcccagcctccacccaaacagggttacctgccacactcacaaccgcagacctcggtgaggaatcaactacctttcccagcagctcaggctcaactggaacaacactctcacctgcccgctccaccacctctggcctcgttggagaatccacaccctcacgcctcagtccaagctcaaccgaaacaacaactttacccggcagtcccacaacaccaagcctcagtgagaaatcaaccaccttctacactagccccagatcaccagatgcaacactctcacctgcaaccacaacaagctcaggcgtcagtgaagaatccagcacatcccacagtcaaccaggctcaacgcacacaacagcattccctgacagcaccaccacgccaggcctcagtcggcattctacaacttcccacagcagcccaggctcaacggatacaacactgttacctgccagcaccaccacctcaggccccagtcaggaatcaacaacttcccacagcagcccaggttcaactgacacagcactgtcccctggcagtaccacagccttatcctttggtcaagaatctacaaccttccacagcagcccaggctccactcacacaacactcttccctgacagcaccacaagctcaggcatcgttgaagcatctacacgcgtccacagcagcactggctcaccacgcacaacactgtcccctgccagctccacaagccctggacttcagggagaatctaccaccttccagacccacccagcctcaactcacacgacgccttcacctcctagcaccgcaacagcccctgttgaagaatctacaacctaccaccgcagcccaggctcgactccaacaacacacttccctgccagctccacaacttcgggccacagtgagaaatcaacaatattccacagcagcccagatgcaagtggaacaacaccctcatctgcccactccacaacctcaggtcgtggagaatctacaacctcacgcatcagtccaggctcaactgaaataacaacgttacctggcagtaccacaacaccaggcctcagtgaggcatctaccaccttctacagcagccccagatcaccaaccacaacactctcacctgccagtatgacaagcctaggcgtcggtgaagaatccaccacctcccgtagccaaccaggttctactcactcaacagtgtcacctgccagcaccaccacgccaggcctcagtgaggaatctaccaccgtctacagcagcagcccaggctcaactgaaaccacagtgttccctcgcagcaccacaacctcagttcgtggtgaagagcctacaaccttccacagccggccagcctcaactcacacaacactgttcactgaggacagcaccacctcgggcctcactgaagaatctacagccttccccggcagcccagcctccacccaaacagggttacctgccacactcacaaccgcagacctcggtgaggaatcaactacctttcccagcagctcaggctcaactggaacaacactctcacctgcccgctccaccacctctggcctcgttggagaatccacaccctcacgcctcagtccaagctcaaccgaaacaacaactttacccggcagtcccacaacaccaagcctcagtgagaaatcaaccaccttctacactagccccagatcaccagatgcaacactctcacctgcaaccacaacaagctcaggcgtcagtgaagaatccagcacatcccacagtcaaccaggctcaacgcacacaacagcgttccctgacagcaccaccacctcaggcctcagtcaggaacctacagcttcccacagcagccaaggctcaacagaggcaacactgtcccctggcagtaccacagcctcatcccttggtcaacaatctacaaccttccacagcagcccaggcgacactgaaaccacactcttacctgacgacaccataacctcaggcctcgtggaggcatctacacccacccacagcagcactggctcgctacacacaacactgacccctgccagctccacaagcgctggccttcaggaagaatctaccactttccagagctggccaagctcaagtgacacaacaccttcacctcccggcaccacagcagcccctgttgaagtatccacaacctaccacagccgcccgagctcaactccaacaacacacttttctgccagttccacaaccttgggccgtagtgaggaatcaacaacagtccacagcagcccaggtgcaactggaacagcactcttccctacccgctctgcaacctcagttcttgttggagaacctacaacgtcacccatcagttcaggctcaacggaaacaacagcgttacctggcagtaccacaacagcaggcctgagtgagaaatctaccaccttctacagtagccccagatcaccggacacaacactctcacctgccagcacgacaagctcaggcgtcagtgaagaatccaccacctcccacagccgaccaggctcaacgcacacaacagcattccctggcagtaccaccatgccaggcgtcagtcaggaatctacagcttcccacagcagcccaggctccacagacacaacactgtcccctggcagtaccacagcatcatcccttggtccagaatctactaccttccacagcggcccaggctccactgaaacaacactcttacctgacaacaccacagcctcaggcctccttgaagcatctacgcccgtccacagcagcactggatcgccacacacaacactgtcccctgccggctctacaacccgtcagggagaatctaccaccttccagagctggcctaactcgaaggacactacccctgcacctcctactaccacatcagcctttgttgagctatctacaacctcccacggcagcccgagctcaactccaacaacccacttttctgccagctccacaaccttgggccgtagtgaggaatcgacaacagtccacagcagcccagttgcaactgcaacaacaccctcgcctgcccgctccacaacctcaggcctcgttgaagaatctacgacctaccacagcagcccgggctcaactcaaacaatgcacttccctgaaagcgacacaacttcaggccgtggtgaagaatcaacaacttcccacagcagcacaacacacacaatatcttcagctcctagcaccacatctgcccttgttgaagaacctaccagctaccacagcagcccgggctcaactgcaacaacacacttccctgacagctccacaacctcaggccgtagtgaggaatcaacagcatcccacagcagccaagacgcaacgggaacaatagtcctacctgcccgctccacaacctcagttcttcttggagaatctacgacctcacccatcagttcaggctcaatggaaacgacagcgttacccggcagtaccacaacgccaggcctcagtgagaaatctaccactttccacagtagccccagatcaccagccacaacactctcacctgccagcacgacaagctcaggcgtcagtgaagaatccaccacctcccacagccgaccaggctcaacgcacacaacagcattccctgacagcaccaccacgccaggcctcagtcggcattctacaacttcccacagcagcccaggctcaacggatacaacactgttacctgccagcaccaccacctcaggctccagtcaggaatcaacaacttcccacagcagctcaggttcaactgacacagcactgtcccctggcagtaccacagccttatcctttggtcaagaatctacaaccttccacagcagcccaggctccactcacacaacactcttccctgacagcaccacaagctcaggcatcgttgaagcatctacacgcgtccacagcagcactggctcaccacgcacaacactgtcccctgccagctccacaagccctggacttcagggagaatctaccgccttccagacccacccagcctcaactcacacgacgccttcacctcctagcaccgcaacagcccctgttgaagaatctacaacctaccaccgcagcccaggctcgactccaacaacacacttccctgccagctccacaacttcgggccacagtgagaaatcaacaatattccacagcagcccagatgcaagtggaacaacaccctcatctgcccactccacaacctcaggtcgtggagaatctacaacctcacgcatcagtccaggctcaactgaaataacaacgttacctggcagtaccacaacaccaggcctcagtgaggcatctaccaccttctacagcagccccagatcaccaaccacaacactctcacctgccagtatgacaagcctaggcgtcggtgaagaatccaccacctcccgtagccaaccaggttctactcactcaacagtgtcacctgccagcaccaccacgccaggcctcagtgaggaatctaccaccgtctacagcagcagcccaggctcaactgaaaccacagtgttccctcgcagcaccacaacctcagttcgtcgtgaagagcctacaaccttccacagccggccagcctcaactcacacaacactgttcactgaggacagcaccacctcgggcctcactgaagaatctacagccttccccggcagcccagcctccacccaaacagggttacctgccacactcacaaccgcagacctcggtgaggaatcaactacctttcccagcagctcaggctcaactggaacaaaactctcacctgcccgctccaccacctctggcctcgttggagaatccacaccctcacgcctcagtccaagctcaaccgaaacaacaactttacccggcagtcccacaacaccaagcctcagtgagaaatcaaccaccttctacactagccccagatcaccagatgcaacactctcacctgcaaccacaacaagctcaggcgtcagcgaagaatccagcacatcccacagtcaaccaggctcaacgcacacaacagcgttccctgacagcaccaccacctcaggcctcagtcaggaacctacaacttcccacagcagccaaggctcaacagaggcaacactgtcccctggcagtaccacagcctcatcccttggtcaacaatctacaaccttccacagcagcccaggcgacactgaaaccacactcttacctgacgacaccataacctcaggcctcgtggaggcatctacacccacccacagcagcactggctcgctacacacaacactgacccctgccagctccacaagcactggccttcaggaagaatctaccactttccagagctggccaagctcaagtgacacaacaccttcacctcccagcaccacagcagtccctgttgaagtatccacaacctaccacagccgcccgagctcaactccaacaacacacttttctgccagttccacaaccttgggccgtagtgaggaatcaacaacagtccacagcagcccaggtgcaactggaacagcactcttccctacccgctctgcaacctcagttcttgttggagaacctacaacgtcacccatcagttcaggctcaacggaaacaacagcgttacctggcagtaccacaacagcaggcctgagtgagaaatctaccaccttctacagtagccccagatcaccggacacaacactttcacctgccagcacgacaagctcaggcgtcagtgaagaatccaccacctcccacagccgaccaggctcaatgcacacaacagcattccctagcagtaccaccatgccaggcgtcagtcaggaatctacagcttcccacagcagcccaggctccacagacacaacactgtcccctggcagtaccacagcatcatcccttggtccagaatctactaccttccacagcagcccaggctccactgaaacaacactcttacctgacaacaccacagcctcaggcctccttgaagcatctacacccgtccacagcagcactggatcgccacacacaacactgtcccctgccggctctacaacccgtcagggagaatctaccaccttccagagctggccaaactcgaaggacactacccctgcacctcctactaccacatcagcctttgttgagctatctacaacctcccacggcagcccgagctcaactccaacaacccacttttctgccagctccacaacattgggccgtagtgaggaatcgacaacagtccacagcagcccagttgcaactgcaacaacaccctcgcctgcccgctccacaacctcaggcctcgttgaagaatctacgacctaccacagcagcccgggctcaactcaaacaatgcacttccctgaaagcaacacaacttcaggccgtggtgaagaatcaacaacttcccacagcagcacaacacacacaatatcttcagctcctagcaccacatctgcccttgttgaagaacctaccagctaccacagcagcccgggctcaactgcaacaacacacttccctgacagctccacaacctcaggccgtagtgaggaatcaacagcatcccacagcagccaagacgcaacgggaacaatagtcctacctgcccgctccacaacctcagttcttcttggagaatctacgacctcacccatcagttcaggctcaatggaaacgacagcgttacccggcagtaccacaacgccaggcctcagtgagaaatctaccactttccacagtagcccgagctcaactccaacaacccacttttctgccagctccacaaccttgggccgtagtgaggaatcgacaacagtccacagcagcccagttgcaactgcaacaacaccctcgcctgcccgctccacaacctcaggcctcgttgaagaatctacggcgtaccacagcagcccgggctcaactcaaacaatgcacttccctgaaagctccacagcttcaggtcgtagtgaagaatcaagaacttcccacagcagcacaacacacacaatatcttcacctcctagcaccacatctgcccttgttgaagaacctaccagctaccacagcagcccgggctcaattgcaacaacacactttcctgagagctccacaacctccggccgtagtgaggaatcaacagcatcccacagcagcccagatacaaatggaatcacacccttacctgcccattttactacctcaggccgcattgcagaatctaccaccttctatatctctccaggctcaatggaaacaacattagccagcactgccacaacaccaggcctcagtgcaaaatctaccatcctttacagtagctccagatcaccagaccaaacactctcacctgccagcatgacaagctccagcatcagtggagaacccaccagcttgtatagccaagcagagtcaacacacacaacagcgttccctgccagcaccaccacctcaggcctcagtcaggaatcaacaactttccacagtaagccaggctcaactgagacaacactgtcccctggcagcatcacaacttcatcttttgctcaagaatttaccacccctcatagccaaccaggctcagctctgtcaacagtgtcacctgccagcaccacagtgccaggccttagtgaggaatctaccaccttctacagcagcccaggctcaactgaaaccacagcgttttctcacagcaacacaatgtccattcatagtcaacaatctacacccttccctgacagcccaggcttcactcacacagtgttacctgccaccctcacaaccacagacattggtcaggaatcaacagccttccacagcagctcagacgcaactggaacaacacccttacctgcccgctccacagcctcagaccttgttggagaacctacaactttctacatcagcccatcccctacttacacaacactctttcctgcgagttccagcacatcaggcctcactgaggaatctaccaccttccacaccagtccaagcttcacttctacaattgtgtctactgaaagcctggaaaccttagcaccaggtactgctctttccatttcatccacgtttagcttcttctccaggcctgtccatgagtcttcttcatccattacaacctctcttggttcttttcctctgtcttccactttacttgggtctaccgattatccagtttctgggttcgataccacttccagtgttcatgtgccgttcactggtccccacacatgtatgatgacaatctctccttcctctatgactccagggtggttttatttatgtatttatttttcatccttccatgaacccctcttctctggatttttttttttttttgagacagagtgttgctctgttgcccaggctggggtgcaatgacatgatcttggttcactgcaacctctgcctcctgggctcaagcgattctcctaccttgtcctcccaagtggcttggattacaggtgcccaccaccatgcctacctaatttttgtatttttagtagagacgggtttttaccatgttgaccaagctagtctcaaactcctgacctcaagtgatccacccacctcagcctcccaaagtgctgggattacaggtgtgagccaccgcgccgggcctccttctgtctgtcatcatgagaatccgcatctgctctggcctcctgtggttttgtttcacatttccaactctttctcctccctgttccaggtgatcccatgggtagagttgtcttcttttggtacataagagtgcttttttcatagctggacctcttgtatcttttgtttccttactctctgctgttcctcctccctttcttactatctcccgggggcagaggtggcagcagaggcatcttcattgctgtgcggtcatctggcatcgtcctgctctccagtgcgatgctgagtgactggacctggaatgggagtgcgtgtttttgctctttgggctcccacggtgactgctgtggattctatctctccacagggttgtgccaggaaggacaaatttggaatggaaaacaatgcgtctgtccccaaggctacgttggttaccagtgcttgtcccctctggaatccttccctgtaggtaatgaccttttctgagacctgcagctctttgcaggccctttcacccctgaaaacagcatggcagtgttggaaggatcagccactgcctcacttgcaggtggaggaggtgtgactcttcccagcaacactgtagggagaacatgaaccttctacctttgccttcagggacaaaagtagaaggtagaaaaatggggtggtcgattttttttaatttttaatttttaggggtacatagtagatgtatatatttatggagtatacatgagatgttttgttacaggaatgcaatatgtaataatcacagcatggagaatggggtacacattccctcaagcatttaacctttatgttacaaacaatcctacggtactattttagttattttattttattttattttttgagagggagtctcgctctgtctcccaggctggagtgtgatggcacgatcttggctcactgcaacctccacctcctgggttcaggtgattctcctgcctcagcctcctgagtagttgagattagaggcatgggccaccatgcctggctaatttttgtatttttaatagggacggagtttcaccatattggccaggctggtatggaactactgatcttaggtgatcctcctgcctcggcctcccaaagtgctgggattacaggcatgagccatcgcgcccagctattttagttgtttttaaatgttcaattaaattattattgactatagtcactctgtcgtgttaaatactaggtcttattcatcctttctaactatacattttttgtacccattaaccatgcccacctccctctcacctccaccctactacccttcccagcctctggtaaccatccttctacgctctgcctccattagttcaattatttggacttttagattccactaacaagtgagaacatgcaatgtttgtctttctgtgcctggcttatttcacttaacaacgacctccagttccatccatgttgttgcaattgacaggatctcattctttttgatggctgaatagtactccattgtgtatatgtaccacattttctctatccattcatctgttgatggacacttgggttgcttccaagtcttggctattgtgaacagcaacaaacatgggagtgcagagatctcttcaatgtactgatttcctttcttttgggtatatacccagcagtgggattgctggattgtatggtagctctatttttattttttatttttagagatggagtcttgctctgttgcccaggctggagtgcagtggcatgatctcggcttactgcaagctccacctcccaggttcatgccattctcctgcctcagcctcccaagtagctgggactacaggtgcccgtcaccatgcctggctattttttttttttttgtatttttagtagagatggggtttcaccgtgttagccaggattgtcttgatctcctgacctcgtgatccacccacctcggtctcccaaagtgctgggattacaggtgtgagccaccgcgcccggccggtagctctatttttagttttaggaacctccatttcttttgagatagggtctcactctgtggcccaggctggagtgcagaggtgcagatcatagctcaccacagcctcgaactcctgggctcaagttatcctctggcctcagccttccgagtagctgggactacaggcgtgcactaccatgcctggttaatttttttattttcgtggagacagggtctcactttgttgcccaggtaggtcttcccatctccccaatgcactgggattacaggtgtgagccacagcacccggcccagggctctttccattagctcacctgcccccctcatcaaagggcttctgtacttagttctgtccctttccctcctggccactggctcctcagggttttgggagacagggaacagtgaccccaccttcctcttaagtttctttcaccttcaagacacccacaggcagagaatgtatcaatcctgggggacattattgggaggtcgctgtctcacgcataccatggccttttcccacagaaaccccggaaaaactcaacgccactttaggtatgacagtgaaagtgacttacagaaatttcacagaaaagatgaatgacgcatcctcccaggaataccagaacttcagtaccctcttcaagaatcgggtaagaccagggcacacccagacaccccagggtgatgtcccacgtgagaggaaattggggggtgcaccccaacttagtgatctgagttcttctgctcatgagccccctccctaccagtctccctaagtcttgaaaggaggtcctttgagagcttccagccttcagccccacatgacccacattatggcagagggagcttcctgggttggtggttcctcctatgggagcttacctgggctccacagaaaggtgcctagggctgcctcaagaagggtaacaggagagtcttcatgctctagctttgtgtgaccttcgctgccttgtttctttcagatggatgtcgttttgaagggcgacaatcttcctcagtatagaggggtgaacattcggagattgctgtgagtatattggggggcaggtttatagatgtggggaaatcctccttgtccctgctttcctgcctcctcctatcatgaatggctagaatatcaatactggttgggtcagagagtcctgcagccgctagggaacactgggggctgtgacacctttcattcttcattcattcatccactcaacacacatttgttgaaagccagccccctgctgggtgctgggaacacagtagtcccagttttccttgagctcagagtggcagaacacagatggaaaagtggctaagcagtctgcttagagtttcagtaaggggcacacagggtgccctgggagaggtcccaaaagcaaagcttggtgtggcagaaggaattcttcctggaaaaactggcaacaggctgggcgtggtggttcatgcatgtaatctcaatgctttgggaggccaatgggggaggatcacttcaggccaggaattcgagactagcctgggcaacatagcgagatcccatctctacaaaaagaaaaaaaaatgtaacagcaaaactgaggcttgaaggatgaggaggaatgatccagagagagggaagggaaggagaggcagttgcagcagagggaatcgatgagaagaagcccagaggggagagagaggagggcagattccaggaacctaaagacgctcagaacggctgggtgcttaagagcaaaggagcagtgatgggggaggaggctggaaagatggctcatgccaagttagttagacttttggcatcagcagtgtagacccatgagggatagtgtctggtctgcagagtagatagctcagtctggctgtagggtagagattgcataagcagaagcctgtactggagatgatggtggcctacaccagataggtgacagtaaaggagaaaacaggtccagtgtgaaaggtctttgggaggcaggaccagcagacctgggatttgctgcaggagaggagggagggaagaatgaggaacgagggcagatttctgggcggctggaggtgtggggtgccctgtgctgcgtggaggaatgtcatgaggggtagaatgggggaaggagatgatgagttcagtgtgcatcacatcaagtttcaagtgcccagggcccagccacatggagtggttgcgtgatgcagcagtggaatgtgccctaaagggtcttattttggggggatcgggggcagggtctcgctctcttgcccaggctggaatgcagtggcataattatggctcactgcaggctcaacctctcgggttcaagcaatcctcccacctcagcctctcgagtagctgggactacaggcctgcgccatcgtgcttggctaatttttgtaatttttttgttttgctttttttgagacagagtcttgctctgtcgcctgggctggagtgccgtggtgcaatctcggctcactgcagcttcacctcccaggttcaagtgattatcctgccttagcttcccgagtagctgggactacaggcacatgtcatcacacccagctaaattttgtatttttagtagagacagggtttcaccacgttggccaggctggtctcgaactcctgacctcaagtgatccgcccgccttggcctccaaaaatgctgggattacaggtgtaagccactgccccagcctaatttttgtaatttttgcagagatggggtcttgctatgttgcccgggctggtctcaaactcctgggttcaagtgatcctcccgcctcggcctcccaaattgctgggattacaagcgtaagccaccacacccagcctctaaagggtattatcagagacacaggcattggtatccccagttggatgtcactggaagtcctgggagtaggaagagatggctcaggtcgggggtgagggagggtcatggcacaaaacgagggtgtcccaggaatgaagctggaaagcaccaacatttaagatctagccagagcccccagtggagaatggaaagaggcagatagaggggtgggaagggtgcttcaagggtgccgtgtccttgcagcagggaagagagggtcccggtgccccaaccttgcccctggctcagcgtcggcaccctggtctttccattttggctcaggattttttttgtccaagtcctcctgagtcctactactgacttatctttcaaaatgacagtgacagatgacttgccttgtctcaagatctctccccccagctgcatcattggctattgaaggagtagcttctaggttagaaacttacctttttctttcttttttaaattttaaaaaatggggtcttgctctgttgcctgaagtgcagtggtgcaatcatagctcaacacagcctcaaactcctgggctcaagccatcctcctgacgtagcgtcctgagtagctgggactacaagcgtgcactaacttggctggctaatttttgtattttttgtagagatggggtctcatcatgttgcccaggctggtcttgaactcctggcctcaagcagtcctcccacctcggcctcccaaattgctgggatgacaggcatgagccaccgcacttcctgccctgtacttcctttttaaggctaaataatattccacaatagaccacatttgtttctccatttgtctgttgatggacccttggtttgcttccaccttttggctatggtaaataatgctactaaaaacacaagggtacaaatataaattcaagacctgctttcagttattttgtatatatacccagaagtagaattgctggatcatgcattaattctattttaaattttttgaggagctccatactgttttccatagcagctgcactattttactttcgcatcaacaggacacagggattcaaatttctccacttgttcatccaagagccactattttgcgagagatgaatttcactcattggcatttatcatgatcactgatatgtgagatcttgaatcgtttcgctctcctccctctgtctgggtggttagctgctggagggaagactctgtattctttctcacctctgggtcacatggcagcttcatctcccattaccactctgggtgcttgggctccacttgctggctgggtggtgacatgggtaactgatgaaacgattcccacttccagcaacggtagcatcgtggtcaagaacgatgtcatcctggaggcagactacactttagagtatgaggaactgtttgaaaacctggcagagattgtaaaggccaagattatgaatgaaactagaacaactcttcttgatcctgattcctgcagaagtaagctcacctaaaaccccttgacacctgtgggtgtcttggagatcgtgaccttgacctctccctcctctacgtcttctttcttctggtactcccaagacttctgccacaggaacccagaagccaggcccagggtgccttccccagatcccaaagctgctcccaacagccccctctcggtcccaggctgaggctatcatatccccatttgagcctcctcacaagcccagctgcatgtctagggtgggcaaagactcccacgggcattggcccaggggagggcatggtatagaagagagaggcctggctacccccagggaggcagagggaagtgtttctattccatcttccttcccatccactctcggcagaggccatactgtgctatagtgaagaggacactttcgtggattcatcggtgactccgggctttgacttccagggtaagcgactacgtggagcgtgggcactaagagtgggggctgggatgctttggccaggctcatgcatgctgcccgcccctctccctcagagcaatgcacccagaaggctgccgaaggatatacccagttctactatgtggatgtcttggatgggaagctggcctgtgtgaacaagtgcaccaaaggaacgaagtcgcaaatgaactgtaacctgggcacatgtcagctgcaacgcagtggcccccgctgcctgtgagtgtccccataagcccagcacccactctgtcctggtgatagggccctccccctccccagcagtcacccacagggttgggggattgagtagagcttgggaggtgcctcctccccactcctggacatacctctcccctgtaatctcattcccaccccccacacccacaagagtgaggagtaggagtagattatagacatagaggtcccaaagctgggcaatcccttcctgagaaagttcatgctgtcaatttccaaatctatctctatctctatctttgtctgtatctctatctctatctctatctttgtatctctatctcaatctctatatctgtctatattgttaatttcccttatgtcatctctgccatgctgtcaagattacctctagctgcagccacagcactaagtccacagaccataaattaaggtgcaaaagaaaaaccatgataacaggcccatttaggtagcagatgcttagagattaggtgggtgaatggtacgtgtctgggacgagacacccaacactctcaggtccccttgagccctagtcatttgaattcctgatctgcagtctccaggtccccccaactccctcagtgcccatcagcctgaggaagtcagggacccaggctctctgggggctgagctccagccgttggagtgagggagatctggtttcctgtgcttaggagagtgggttaacccttgggatattggatgtgagggatcccaggggatcagcgtgagcttgtctgtgtccccaggtgcccaaatacgaacacacactggtactggggagagacctgtgaattcaacatcgccaagagcctcgtgtatgggatcgtgggggctgtgatggcggtgctgctgctcgcattgatcatcctaatcatcttattcagcctatcccagagaaaacggcacaggtgagcttgtgaggccagcaccgcaggcccacacagaggggacagatcctggggtggccactgtctgaatgtcctaaggctctgctccttccaggccagcaatcagagaggtcagctgaggccagatggggtgcccagaccctcccagccctgggtgcagcaaagggcggccttcctgtaggatacatcaatttggcagtgttttagtccattttgtgctattataacagaataccaccactgggtaattgataaacaatagaagtttatttggctcacagttctggaggctgggaagtccaagatcaaggggctgcatctggtgaggactttcttgctgcatcacagcatggcaacatggcagtctgcagcacatggacagagaggaagagagggctgaactcactttttttttttctttaagagacagggtcttgctgtcacccaggctggagtgcagtggcatgatctcggctcactgcaacctccgcctcccaggttgaagtgattctcatgcctcagcctctcgagtagctgggattacaagtgcattccaccatgcctggctaatttttgtatttttagtagaaacggggtttcaccatgttggccaggctggtcttgaactcctgaccttgagtgatccacccaccctggcttcccaaagtgctgggattacaggtgtgagccaccgtgcccggccttaaattaaattaaattaaattaaattaaattaaattaaattaaatgtgttgtagaaatagggtctcactatattgccccggctggtctgaaactcctggcctcaagcagtcctctcacctcagcctacaaagttgttgggattacaggtgtgagctgtcacccctggctgtctgaactcgcttttattacacacccacttttgagataatgatgttaatctattcatgaggacagcaccttcatgacctaatcatgtcttcaaggtcctacctctcagcattgctgccttggggattaaatttccaacacatgaactctaagggacacattcaaaccataacacagagaatggaaacagaagcttatgtgtggaaattagactatgtaatgacattccctgtagttagttatcactcaccttggccaccacagagcacagcaccacatggggaagctgagatggagcgtctgggtctcacttttcccagctgtaaaatgggataagatgcacctgtgaaggttgctgggaaaccctggcacagtacctgacccgaagtcagcaactgaagggagctaccctacgcccccatctcatggatatggaaactgagggccactaaagggagtgaggggcagccaggaggcctggccagtgcttgccttggtagaagggaagccatggtgatgctactttttgttctctgccatcatcgctgccatctctgactcggggtgtggctgtgactgtcccctcgagggaagctgaaggtcagggtccaccaagtccctcctcagcctccttgcctacagctgctcaaggcatttctgtctgcagggaacagtatgatgtgcctcaagagtggcgaaaggaaggcacccctggcatcttccagaagacggccatctgggaaggtacctctagttaagggcaaggagatgagcagagctggagggtgaagaaaggcagggcggtgcctgtgcctgtgggggtgacgtggggtccagcccccctttggggtggctgtgactgacagcccgttccctacctgccgctgcagccccggacccagacaccacccctgctgtgtgcaagagtgcaggagtggttgagaaccagatcttgcccccagagaccaactcagtgagggcatccagtgcacactcagctaagcggggtgatagggccattcccagggcagagggagcagaggggtggacctgacccagcctgggtggggatagggggtcagattagcccccaggtgagactgactcttgaataggtgagtaagcaggtgtgcttcctccttcaacacagtgggagcccagtaagcagggaggccttatcccagtgaggacaagggaaagggcaccccaggcagggggcactgcatgagaaacgcctgcagttgggaaggagcttgcttttggcggggaagggaaggcaggtcaatctcacaaagaaagagtgagggacgtgaggttggcagggctttgggaatggggtggggggttgaggggctttggccgcccacctttttttgtgagacagagtctcactctgtcacccaggctggagtacagtggcacaatcttggctcactgcaacttctgtctcccaggttcaagcgattctcctgccctcagcctccctagtagctgtgattacaggcatgccaccacgcgtggctaatttttgtatttttagtagagactgtagagacagggtttcatcatgttggccaggctggtctcgaactccagaccttaggtgatccgcccgccttggcctcccaaagtgctgggattacaggcgtgaaccaccatgcccggtcacattttgaattttttttactcaaaaggccattcagggagcactaaagcagggagaccaggtggaggaagtgaggctgagggggtggggggagggagaggagacgcagcctggtggagatgaggctgagtgggtgggagagggagagggagtgagggaggatttccgggattgtccgagctgacccttgggccccgaaggatgggggagaagcagccggtggagcacactgagttggggggctggtgggtgctgaggaggaggctgcaaggctcgtgcctgtctgaatctccgggaggggtctgcagcctgaaccacgtactggaatagaggtttgtccattcatcggggagaatgcagagtgagaagtgaggagggtgaaaggagaacccccccccaggagcccccgtagaaggacaggtagggcatgaggaccccgatctaggaggacgcaggaaaagaggggtcagaggtgcagggagagccccggagtccagagagtgagtggttctgcgggaccaggaagtaagtgatcgctgtgctccgggaggatgctggaagaagattccagacgcagcttttttgcctgctatggttaccgttgctatgaaggagggcggccctgctgacccagagccagccctgtctcccgctccactctgacctcacccctgagtccagggctgaacgcacgctcctccgtggcccccgcttccaccccgtgcatgtggggggcttctgctccgctccctcctgttccggggtccagcgggcggctccccaggcaggctctgcacttacccgcagcccagtgatgcagggtcggaggggtggtcggcagtgggaaagggcgtagggcagatgccgggctgactcttccttttgccagaggaaatcccctctgccccctagtcctccccctaccaaggctcccatcactcatcacggcctctccctacagaccagaatctgagggagagcagattcggccttgagaacgcctacaacaacttccggcccaccctggagactgttgactctggcacagaggtgactcagctgcgagctgcccccaccccctgaggctgctccacttcctctggggttccctcttcccccgggactcccttctccccctgggactcccttctccccctgggactccctcccttccccctgggaccccttccctttcccttccccctgggactcccttcctccccctgggaccccttcctttccccctgggactccctccctccccctgggaccccttcccttccccctgggactccctccctccccctgggaccccttcccttccccctgggattccctccctccccctgggaccccttcccttccccctgggactccctccctccccctgggaccccttcccttccccctgggactccctccctccccctgggaccccttcccttccccctgggactccctccctccccctgggacccctcccttcccccctggattccctccctccccctgggaccccttccccttccccctgggactccctcccctccccctgggaccccttcccttccccctgggactccctccctccccctgggaccccttcccttcccccgggactccctcccttcccccgggactccctcctcccccaggactccctcctctccttaggactccctccctctccctgggacactctccctacccctgggactcccttctccccctaggactccctcccttctcctgggactccctcctcccccaggactccctcctcaccctggggccaccccttcccctgggactcccccctcccccgccactccctcctctccctaggactccctccctccccctgggactccctccctccccctggggttccctcctccccgccagggctccctcttcctcctggggctccccctttcccgggtctgccccttggcctcacctcttctctcccgtcccccagctccacatccagaggccggagatggtagcatccactgtgtgagccaacgggggcctcccaccctcatctagctctgttcaggagagctgcaaacacagagcccaccacaagcctccggggcgggtcaagaggagaccgaagtcaggccctgaagccggtcctgctctgagctgacagacttggccagtcccctgcctgtgctcctgctggggaaggctgggggctgtaagcctctccatccgggagcttccagactcccagaagcctcggcacccctgtctcctcctgggtggctccccactctggaatttccctaccaataaaagcaaatctgaaagctcagaatgagaagtga

SEQ ID NO: 394 - DNA, 20910 bp, Homo sapiens
atctctttcaaggtttctgctgggtttctgaactgctgggtttctgcttgctcctctggagatgcagcgtctgttgactccagtgaagcgcattctgcaactgacaagagcggtgcaggaaacctccctcacacctgctcgcctgctcccagtagcccaccaaaggtgagtcactttctgagaagcaccttgtaactagtaaaagatagtttttccctgctattggggaaaactcactagaatcccactcaaaatttggcaaggcttgtgcacagcagccttagacaagcaagttaactttaaagggtctcagttacctcatctctaaacagacaatccctttcagctgtagagtgagaagagcccaaacctctgacacatgctgtgtttgtgagcaatggcaacttttactctgccagctgcatgaagcagtagaaatatcagtaccaggccacagctttcctctctacaccaccattcccaccttcacccctagcctctgcctagaaccacaggaccttgtgccaactgcagtgttagtaaaaccagtgactttatatcactgcagcagaatcagaaatggactgaggatgagaagctgtgtttgccttgtgttccaattttatgaaaaggggaaatgtgtgtttatgtgtgtatgtgtacatgctctttgcaagaagaacatgcacactccttttctttgtaaatagtccctgaacatggctcaagtgcttatgttttccattgtcagcgatgatggtaacacagctatcgttagtgcctcaggctcccagccacctatgtgtttctgtctaatccccaaaccatccactacacattgggactagttctttatttccttacatttttactctatattctatgactactaaatatttagaaaaatgattttgacctagtgtctttccttgccaaatacccaaggaacctgggtgtatagatgtgcatggtagaggcaaatgcacatagctttcttatatttttcattatgctaccatcatctcactctccccatgcactgccaaaccctgcatgtgggttaaatgtcccagctcaggatttaacctgtttctatatttgtgaagaagagattgatgtgggtttcttgttttaatagcaatagttggccatcagccaaaagacatacatcaatcctccccaacattctgactcccttggttcaaactcttggaatcattcccatttcccttctggtatattcacagttaatcccattatgcatggcttgaactaatattgcttttcatgagtcaccttttctctatatgtctaatcgcctttaatccaacccacattggctctaactccaacctaaaagagactttcatctcagcatctgctttgctgtcttcaaaattcggtaagacttgtgccctccacttactgtatttctcacatattgtctccctgctcccctatacacctgcatctccagggttccttacttgttcagtcaccccctgccgtggccactgccccttcattcccctccagttcttcactggcagaagtctgtcatccatcaaggtttgcctcaaatgcggtctcttccacgaagcttctctgatcctccaacccactgaaatctctgcttcctttgaactcctgtagattttgctcacattcctttttgtgggcctgaccacattctgccttgaagttgggttatatgtgtgcttatcattcctcacactggtcaaggaggtctcaagaacctcaccctcttcttttctttgtccaacccctttgttcaaccctcacaaacccttcccagcacagtgcctgaagtgtagtaattaattttgaaacacaagggaaggaggcaagatggaatacagaagtaaaggtgtggtgcatgttcttgaagtgggcaacaccaggagaaaaatgatttaaaattacacaaagtgatcattctttagagaaagcacaagatgagaaggatactcttaacttcggtgggctgaagcttctggaagcctctccgtgttaattttcttcaaggctttataatccatttctagaaatagctccccaccaagacagctacaaaagttaccaactgacccattctaagcttcttcttgcaagctttgatttctaactgggaagaaagggagggagccagcccagagaagtcagagcgagaatgaggctgagagaaaggcagccaagctggcaggacaagcgctggcttaaccattagctcccgggtactggggaagctcctccgtaaatatttgagagtacaaactccagttatttggagggagtcaaataaatagggaagataaataaactccaaacctctcctgtcagatataatgtgtatttatcattctgcctcactatcttgtgatcatatgatccacttttgcctcacagctgtccttagaagtgaccttgctgctgggagaggctctagaattctaccagaggctcagaatcccaaagatgattgatagacacattcaatctgagttccagctcccgtagaatggagctaaatttataagcctggcacccagggcagtgaagggacagagtatttctaacacgtgagaaactatgaagttaccctgagtgcatcactttaccagtgtgtgccttggtttcactaactataaaatgaagaatgttgctaaagtgaacagaaggtataaagtacttttgtatgggagcagtacagagatcaccaagttcacctccagtatgctcccatacaaaagggaacacagattttcgccagggatattaagaatctgggttaaagagaagtgaattggtccagaaaagaaatagatcatctctcccttcttctgctgactccttccccttccttttttcctctgctctcgtttagaattgctctttctgctgtctgtgttccctgcatatttagctgtaaaatgtctgcttctttcactgggctgtgctctctttatgggcacaatgcatgtcttattcactgctgtgtatttggactagaactgtgttgggtgtgctcaataaacattggaaggccctatcagaaaaatcagctagcagaaaacttacttaaaagtaggaaaacagtgggtatgttcttgtgtagaaaaaagaaaggagaaagacatgtaattagaggtacacttttaaaatgagtaaagattgtataattatgccctataagggcttataacatgtagaagtaaagtatatgacaataatggttcaaaaggatgcagagagtaaataaagtcaacctaaagtttttgcagtgttccaaaagtaagataagtattaatttaagtaagattacaacaagccaattatgcatgttataatctttaaggtcaccagtaaaaggaaaagagggtataaaatgaataataaatatttgcttactctaaaaggatatgggaaaggaggaataaaagaacaaagaacaaatgagacaaatagaaacaaataaaaaaatagacttagttccggctgggcgtggtggctcacgcctgtaatcccagcactttggaagaccgagatcaggagatcgagaccatcctggctaacacggtgaaaccctgtctctactaaaaatacaaaaaattagctgggcgtggtggcaggtgcctgtagtcccagctactcaggaggctgaggcaggagaatggtgtgaacccaggaggcggagcttgcagtgagcagagatcacgccactgcactccagcttgggtgacagagtgagactccgggtgacagagtgagactccgtctcaaaaaagagaaaaaaaaagatttagttccaactatattagtaattacaacaaatataaatggatgaaatactcaaattaaaacaccactattgttagacttattaaaatttttttaaaggactaaaatatatataccgatcacaagagatgtatgttaaagataaagacgttaagaagttgaaagtaaaaagggacagaaaaagatgtaccatggaaacagtaagcaaaaagctagtgtagctatatcgacgtcaggaaaggaaactttatgccaagaatatcacaaagatgaaaagggatatttaataagtatagaagggtcaattcaatgaaaagataataacaatactaaatttgtagtcatctgataacatagcttcaaaatatagaaaattaattaaatgattgctatgttactgtcttttgaggaaattgtctacagaccattagtgggagtttgactgttatctccatcacaggttttctacagcctctgctgtccccctggccaaaacagatacttggccaaaggacgtgggcatcctggccctggaggtctacttcccagcccaatatgtggaccaaactgacctggagaagtataacaatgtggaagcaggaaagtatacagtgggcttgggccagacccgtatgggcttctgctcagtccaagaggacatcaactccctgtgcctgacggtggtgcaacggctgatggagcgcatacagctcccatgggactctgtgggcaggctggaagtaggcactgagaccatcattgacaagtccaaagctgtcaaaacagtgctcatggaactcttccaggattcaggcaatactgatattgagggcatagataccaccaatgcctgctacggtggtactgcctccctcttcaatgctgccaactggatggagtccagttcctgggatggtatgtacggccacgaaccttatgtaagaaaggtgctggaattggaggctgaatattaccagttttgcttttcagttccccaggtggcttcatctagtgaaggaaggacaatatattcacacagctgctgctatcatcccacaataaccacttagacttatatagctttacagttaggtagcatgttcacatagccattcatttaattcttacaacagcctaggaagtgtgtattataccagatttatagaagagaacatggaagatctgatagcttacacatagtgagtggcagaggcaaaaatgccaaaccacatctgacatatttcctattttaccgtacctgtttctcttaaacatgtcctaagtctctgagagattggtgatgttgaaagatgtatgcaagtttagatgttcgggaaaaaaacaccttcatagaaacaggcccagaaaaccacaagatagactgtgagtatttctactctttctcccttaggtggctccttgcatattgctttttgcttaacatattaacattaccttgtatcttacttatatcttctcccagtgctatatttgaggactaacccctgttgttacagcaagaaatgattcaagggaaacagtacagtatgagagcttgaagccatagctctatcaataatcattgataaattcctgaacctctttgagcctcagggttatttgcctatctgccttgcttaacttataagaggactgaataaaataattcatagaaatgtgaaattttcataaagatgtgaaaaaacagtatgttggcagtagttaagacactctatatttactaagtttgaaactaggattaaaaaccttagaaaccatgataagcattaattataaaattaatcaaaaagccttaatattggcagagtcctcagagatcatctaattcaatatcttttgctttagaaaaaagaggtcaagaggagtgtaacagtttatctctgtacatgcagcaagaccgtgcaattacaaaagttcattccaggcttttccaactgccctacctggctccatcattaacaattccactgacatgggatggtccagtctacatcatcaagtctgttcttaaagtgcctctcctacttgatacttgtattactacctctctagtaacccctaccaccattaccaccactgatatgtccaaccaattatttagttgaggagtagaaatgaaaaataaggggcattcaccagcctttaaccaaaaatcaaagagcctattcttgagagcattgtcagccttaagcatgccatttcaaatgcgtagattcttctgaggggctgggtattccacagatggggttgcaaatgcatcttttaaaaaaatgtggtatctaggtataaaagtaaaaatttaaaaaacaagttattgaaatgtgaatctttagtttgtatttaaaacaaaaacagctaagcttgagcctggacactcggactacataccctgcaggtgacagtaaccaccaggaccagaggatgccagtgtgaatgagaactctgcttctgacctagccagtcattcatctggggaccctcaggtgggagggagtggctctgagactcagggagttctgaatcactccagagaaaagtggaggggatgaggaaagagaagagtatttctggctcagattggctgggagtccccatgttttcttgtgtttttttttttaaatgaaaataattaaaatttatatttggaaaaaaacatacacatacacaaaagtatataaagcaaagaaagactcctcatttgacctgttaccacttcccaaaatttaacactgatggtttatatgtattcttccaatattttttctaagtacctgcaagtatacacatatctattccattttaaacattgtacaaaatattcctcatctcttaggtcttagaggtaattctgtatcaacatatgtaaggtctatctgattctttttaaaaccacaatattcttgatggatatgccaaattttatttaattaatcccatattgatggatatttagttttttagcaatgataaataaagttttaatgaacattgtacaatagctttgtatacttttggcattgtattgtaagaataaattcctagaagtggaatatcaggataggttgatttaaaagtttgataaaatgtgccaaattcttctccaaaatgttgtactaacttacattcctacaatgtatatattatcaaactttctaatctttgtcaatttaacaagtaaaattataatgtttttgatttgcgtttcttttactataagaaatcttgaatatttctatgttgtttattggcctttttttattatatagcttgcctttttttattttttatttatttatttttttagacagagtctcgatctgttgccaggctggagtgcagtggcggtgatctcagctcactgcaacctctgcctcccaggttcaagcgattcttctgtctcagcctcccgagtagctgggactacaggaccccaccaccacacccggctcattttttgtatttttagtagagatgggatttcaccgtgttagccaggatagtcttgatctcctgacctcacaatcctcctgcctcggcctccccaatcgctgggattacaggcgtgagccaccgtgcccggcctagcttgcctttttaatgaaacttttataaatgaagataaattgatttttgttgattgtaagtattgtaaatactcccccaatttgtcttttgactttgtttctgatagaaggctttgatttttagataatcaaatttactggccttttcctaaatggattctaaatacttttctatagtttctaaagttttcaaaatgtgtgcgtgtgtgtgcttatatacaggtagaaaaaagtattgttttcccttaattttatgtatataaaaattatatatacttaaatatatatttatatatattaaatataccaatttacttatactaatatatttatatatactaaatatatacttacatttatatatttatataaattatttgtatatttatatatatacacacacacacatgcacatagcattggggaagaaaacaatactttttcgttgatgttggagttgggattgttataattcttaagagaaggtccctggatttcagtgaatttgggttggagtcctgactctgaatccttaccctaccatttattagctatgtggtttttgggcaagtggcttaaattctttagccctcagtttcttcatctgtaggatggggataactatatctgctacatagatttatcatgaggattaaattatatagaaatgtggctcccaaagcagtgctgtgggtgaatactgggagcttcctcacaggtcagaatactaaaattactaccatatctcacccacaaacttgagtttttgggacagtacttcttacagatgaaagtggaacacataatagtcaagaccacaattatttattgaatactagtctgattatcataaagttagtgactacggatcatttactcaatataaactattttcacaatgaaagtagtgccacacaattcaaggcacgtggttcaggatccagtcagaactgggtttgaatatcaaaatccatattaactagctatgtgaccttacactagttactcagtctctcaggaaggcaatgtcttcacttgtgaatgtggatgttacctacctcattggattgtttcaagaattgtttaaggttaactagtgtcctactagtgttttaaatgttagtttccctccctgtcctttaccttctatgatttaggatataatttcaggatcatggtgtgctataaggagatgggtacaaacccaaacctgaattgtctccaaaagtgcgaattaacacatttttcactgaagtcagagacagaattctgaataaatgagcgttttacagagtgtcaggacactaaattttgactttacatttcaaatgtatcatgaattgcactagaacataagctccacaggactgggattttttattttgtttatcactctatatccaggacctagaattgtgcctggtacacagtaggcactcagtctactctagatttggtaatgatggtaaatatttcttgtttctctttacaggtcgttatgccatggtggtctgtggagacattgccgtctatcccagtggtaatgctcgtcccacaggtggggccggagctgtggctatgctgattgggcccaaggcccctctggccctggagcgaggtttgtagtaatccattaccaagaggctgtgcatggcatagccaagaacatagatcctaatcccacattggcacacctgctactcagggctgaggtatgcgtttgaggatggtattgcttgcctctaaaaagggctggtctatggagcagagggaggagaggagaaatgggagaggggaatccgcgaggcttcctctcttgcatcatcaggcattgggataacgatgcatggaatgagtggtgcagatgatggtgaggaatcttagggaactcttctggcaattgaagattaaaatatataactggatataaagtgaaagtctttcctttgagactgttggcttctattctaggttttgttaagcccatgtaggtgaggaaagggaaatatacatctcatttttgtaataccaacaacctgtccaactccttttgaatatgcaagggatgttgaatgggcttgaacttgggcatgggacacagataatgaccagaaacctcctttatatggttctctcatcttttgtgctcaaggtaggctgcattgtgtagtctctgaaacactttgtgtgcctttccagggctgaggggaacccatatggagaatgtgtatgacttctacaaaccaaatttggcctcggagtacccaatagtggatgggaagctttccatccagtgctacttgcgggccttggatcgatgttacacatcataccgtaaaaaaatccagaatcagtggaagcaaggtatgagattcagagggcagaaagtgggggctctatttacataggccaagggtttgtacccaaaggccatgagatggtcttttctctcctgccttgaaaataatgtcaagagaattgtttcctgtcctctttcttacactcttccctgggtctatgctaaaatccatttggaagtcattcaacttcaggtgtaaaattgcttctaacttgagctaaataaaagaaagtaaataatccagggcaaggcccccagtgtgaaaccaagggatgtcagccacctgagaagatggtgttaagaggctgggcagtcacattcgacagtggttggcatttgtttctggttaagtcaggcatggtttggctcttggtttgtggtttaccatcttttaaagtctcacgttgagaaatcatacctatattttctatatgctgaagtgttatcagtgatttttctcttcgtgatgctactgcaggttgattttattttcacctttagttttggaatttccctcctgagaaatatgtactgctttcataagcagaaaataagcaaataaatcttccttttaaaatacagaaaagcagggagtggtggctcacgcctgtaatcccagcaccttgggaagctgaggcaggaggattgcttgaacccaggaatttgagaccaatgtgggcaacaaagcaagaccctgtctctaaaaaaaaaaagtacaaaagttagccaggcatggtggcataagcctgtagtcccagctactcagaaggctgagatgggggaaattgcttgagaccaggagcccatgcagtaagctatgatcaagcaactgcctccagcctggactacagagtgaaacaaaccctgtctctaaaaacatataaataaataaaaataaaatacagttaaacctactttaaagacataaatagtattcttgcctgctcaggcatgcccagatgggcatccgcaaaagacagattgcagtgtgggagaaggcatggatgccttgggggtgtcataaagagctacctcttgtccctttctactgcagtgggtgggacaccacctgccagaggtgaacctcatgggcaagaagttgctttgggcctctctgcctcagtctgtcttctgtaattggttatttgctcctaactcctctgaattcttgtggcatttaaattttactccttatttgcatatgtaaggtgacagatgctgctttggatcccagcactaaaatgtaatatttcctaagggcagagattgcattgccctcttcttcagagtgagagagacagtctgtagagtagagtcagagacatctgaacctgaatccaaagccagccttttcaaagttggacagatgacaatgttttgtagaccggttcctcctctggcaaatgaagaaaattatataacacaaggttgatttgagccaagtatcatagaggctggtaatagtagatacaaaggctttgtttctttcccttctttccttattcgtagagattgcttagtaagtgcatgtaaaatgaataaataaagctcatatgtgtttgcaggaggtgggaagtagttccctgggaggcctggagaaactcggcacagttaaatctcagggaggatatctaaatggctcgcccctcatgccccatccttgccttcacgcttcctcttccagctggcagcgatcgacccttcacccttgacgatttacagtacatgatctttcatacacccttttgcaagatggtccagaagtctctggctcgcctgatgttcaatgacttcctgtcagccagcagtgacacacaaaccagcttatataaggggctggaggctttcgggtgagttctcttcttggggagcctagaggctggtgaggtgtgagcaagaaggaggcttcttcatgccttaagtctagaccaccagcacccctgtgggggacaaatggcaatcctccagcagaacaggaacaatcccaggtccttccacggggtagtgggttattgtctgggtagggccctccatgagttattgcagggaaacatgggggatttggcagcactgcaggatcaaggggcagtaagaaactacagaggataaagaaagaaagagagaaagggagaaagagaggaagggagaaagagagtagctaaatcattcagtcaataaacattttctgaacatgttatgtgctagacatcgtattaacctctcaggatactaaaatgaatgtgactccatggtccctgccctagagcatctcacagcctatacagacacaaacacacagaagcaaatgatcacactacagggtagcaatttgagaagtgtcaggtcccattctcatttgccattgtcttaattcatgtcctgcttttgcttttctcccatctataaaatggggatgttccagctcatccccttagatgtgaaaaagcagaaagaatgctgtttattgattcactacactaatacactaatatttacaaagaaatgtcttcaatacagtttccactgggaaaggaatctttccctttcttcttggtacctgtttatttcaaattttggtcaattttatcaacagtagaataggctaccaagtgtagcccctgttactaactagtactcctaaccctgccactaactaaaacatcaaaattagcacaaacactgcttgtaagaccagccctatcgaaacaaaaagtataacatataccaaagatactagcttaatatctttaatatataaagatattatcaataataaaataaataccctaatagaaaaatgagcaaaggatatgaacagaaaattttctcaaagaagacatgtatatgatcacattttaaatatgcatattcattaataaaaagtttactcaagttaccattttctctagatagtctttttaaaatgtgaatacccagaattgtcaagcctgtgggaaaatgggcagtagtggatgcgtaaatggatcaggtgttttgaggagtaacaggagagcatgaagccaaagccttaaagatgtgcaaactttgggctcagtaatcccatgtgtttaaaagaacacctacctattcgctgtagtgttttaactagtgaggaacaggagcaggaagatgggttaaagtgcggtacatcctgtcatggaccattcttcagcctttacaaataatgttatagaatgtcatggaaaaaaaatatatatatatatacacacacacactaagttaagaaagtatgctaaccacaacacatagcatgattttctttctaattttctagtaagctctataaaattagggatggattccaccagaaaaataagccctaagtactctctctgaatggtaaggccattagtggtatgttctcctctgtactgttctgtatttccaaatattgtaggaaaaacatgcgccccaaagtcctctccagaagctgttacttttcccccttgctccctgcctcccgtcccctggcctctcacatggctacctctggctacctcacagggggctaaagctggaagacacctacaccaacaaggacctggataaagcacttctaaaggcctctcaggacatgttcgacaagaaaaccaaggcttccctttacctctccactcacaatgggaacatgtacacctcatccctgtacgggtgcctggcctcgcttctgtcccagtgagtactgcatctggctccatgtcctccatgcacaccctcagcctccgcccccgtgggctgcagggtcaacaaagttgggtttctcttttggctcagaaatttaaaagaaaggaaggggcctggtgtagtggctcatgcctgtaatctcagcatttggggaggtttaggcgggcagatcgcctgaacctaggagttcgagacccgcctgggcaacgtggtgaaacctcatctctacaaaaattagctgagcatggttgtgtgcacgtgtggtcccagctgctcgggaggctgaagtgggaggatggtgtgagcccaggagtggaaggttgcagtgagccatgattgtgtcattggactccaacctggatgacagaatgagatcctgtcataaataaataaataaatataaaagaaaggaaaggagggagaaggcaggaaaaggaaggaagatgaaagaaactcgtaccaaaggtgtatgtataggcagatttacagtctgtatcagacagtggtctccaaagtgaagtacatgatgtcaagggatgggcaagatctgtttgggcacatcaagaaaacagtagctttggtatgcatatttttgtctcatttatttaaaatctctatacttagtagagcatggtggttaaatgggtctgactttagagcccacaacctgggttcaaatttttttaaccaattattagggttgactttggataatacttaacctcaatgcacctcaccttccccaactgtagcatgtgtgcaatcacaatacctgtgttctactgtttttatgagcattaagtatctaaaacaattaaaatagcagtgcttagcaggtgctcaaatgttggatgttatttctattcattttctgttttgtgggttttataaggaagtactgcatctaacataagaaagggctcatgaagtggctcatgcctataatcctagcactttggaaggctcaggcaggaggatctcttgagctcaggagtttgagaccagccttgggaacagagggaggccccatctctacaaaatttttttaaacaattagccatggatgttcacggtggctcatgcctgtaataccaacactttgggaggccaaggtgggaagatcacctgaggtcaggagtttgagaacagcctggccaacatggcaaaaccccttctctactaaaaatacaaacatcagctgggcatggtggtacgtgcctgtagtcccagcaactcgagaggctgaggcatgagaattgcttgaacccgggaggcagaagttgcagtgagctgagatcgagctactgcactatagcttgggtgacagagtgagactctgtctcaaaaaaaaaaaaaaaattagctgggtgtggcagcttgcacctgtagtcccagctactcaggatcctgaatcctgaggtgggaggatcacttgagcccaggaggtaaaggctgcagtgagccatgatcacgccactgcattccgggcactccaggctgggcaacagagcaagactctgccaaaaaaagaaaaaaaaaacgggcaggaaaaagtgcttatgggtgaacttgatcaaattattactcacaggggatgatcaaaaagttatgactgctgaaccattaccaatcaacatgggagcctgaagggtgagtccagtggtctgatctccatctggagacaccttcagaatgcactgaatttaccctgtcctcatgagaggggagaagctctatgtacaccaaaaattatcttgtgttttctctgccttatatatcttggatattagctgctttccttttggcaaggtttcctacacaaaggcctgtccctggggtctaccagaagtccctctttatgtagggtgcctggaacccatttctagttgcatgaggtagacagggagaagatcgggatgataggctgttgttctatttgaagtgcagaatataatatatatatacatatatgtgtgtgtgtgtgtgtgtgtgtgtgtgtgtgtgtgttttatttgatttctttccccacagccactctgcccaagaactggctggctccaggattggtgccttctcttatggctctggtttagcagcaagtttcttttcatttcgagtatcccaggatgctgctccaggtgagtgtcatctttctagtaggccttcctgacaagattcatctggtagaataaccatcttcttccccaccattactgaggctgccatcttgacagagttacgttattattaatagcaaagtaaatcactgaagggatttaagcatggagtaagtttgtttaatttatgtgtttaaagcacttatttggctactacttagagactagattgaaaaggaacaaagctggatatggggaaaccacttagattgttccagtaactagttcaggcaagaggtaatggtggtttgattgcaactgattaaagagaagttgatggatttgagatacctaataagaatttattgattattttgtgattgatgtgattaaggacatgcatttaagtactatgtggcatacaccttgaccaaatcagtgtgtctgcctgcatgttttgctaacaagtatgcttgcttatcatttcttggtattctaagccacacacaccacacgttcctccagggtgtaacctcccacagaacctggctctctgttgaactcgtgattggcaatagtgataatgacaatgaaaaaggtgtaacaatcttgcttttgcttcccaggctctcccctggacaagttggtgtccagcacatcagacctgccaaaacgcctagcctcccgaaagtgtgtgtctcctgaggagttcacagaaataatgaaccaaagagagcaattctaccataagggtaagaaaaaagtcaggaagagaggaagagagaccccattccagtagctgggagccagggatttctttggaaatctagaatttagtagtccagggtcaagacttttacgagatatggttgggagaagatttgctagaagatctgttgtccaaaggggcaagaagtgggtggggaaacagaagatagagttgggaagagggaggcaggatgcagcttcccagtatagaatatagctaaacacccagaatgtgtagtcccatggaagccagaagtatagtctttgaaaataccatctgcaacagttgaaagagtacagactttagagctagatatccaaatctaaccctgagctgtgccactcactagctgtttatctttggaaaaatggttgaacttttctcagttgtcttatttctaaaatcataccgattttgcaggatttccaaacaaattaaatgaattactctatataaatatgttatcgacaaatattactgtcccctccaaattgccctctttctccaccaaacataaaaacaaaaaacaaaatattgctccaaaagcaacaaatgaaaggaaaatgaaacccaaaggtaatactagagtgattagttggtggttttaaaaccatagtaatacacagttttaccatgatttctacaggttttatatatattctcaagcaaaacttgggatgcatgttgttttgcagcatggtctcaaaaggagacagaatatacggaattggaaatgttccagaaaacctagacctagtggtcattgatctcttctggaccagtggatatgttatagcaaagaaagacaatgaaaataaaaatggagcagggcacagtggctcacgcctgtaatgctagtcctttgggaggcagaggcaggtggatcacttgaggccaggagtttgagaccagcctggccaacatggtgaaaacccatctctactaaaaatataaaaattataaaaatatgaatataataaaaaaaataaaattatgtaaaaattagccgagtgtggtggcacacacctctaatctcagctactcaggaggctgaggagaattacttgaacccaggaggcagaggatgcagtgaactgagatcacaccaccacactctagcctgggtgacacagaaagactctgtctcaaaacaaaaaaaaaaaaaagaagaaaagaaaaataggacctctgagacaaacgttaacggacaaagcactgaaatactgcaatgaatcagaaccagaaaatttagagtttagaaggacgtgtctgttaggaaacaggaagctgggaattacgtctcaaagtaggaactattggcaaaaggatgggatgaagatttcaatggaggaaggctatgtttactgtaggaaaatgttgtactcttataataaaagtcttaatagacttttattaaggccttaagtgctagattcaagatggctgcccctcttgttctgtgggtccagtgttctatttggtggactaagggtgaccttgcagccccttacagcccagccaagagagcttcactgtgaaggggcagacatcttcattactattttctcttccaaaaactcatataactctttgtgagtactgcctcttctcctcattccacagtgaatttctccccacctggtgacacaaacagccttttcccaggtacttggtacctggagcgagtggacgagcagcatcgccgaaagtatgcccggcgtcccgtctaaaggtggtgagtgagagtttgcagagttggtggcataaaaccctaatgtcttcctctgagtaacaacacagagagagaaggtggggacaggtgcagggagaagaaagtttaatggaagaggattggggtgacaggagaaatgggagaattatctgtggaatttttaaaaggaaaagcaagtattcagaataggaatcttgtagtttgggaacattaaccaggccagggagggttcacagctttcaaactaatcagaagtggggatttgtaccataaagaccaattaaaactcttggggctctttgccttggaaaggcaaaagctgggggagaaacatgttctgaaatcttgaatgtgaaaaataggagctggatttgtttacctgatctgctgaagataggaagctctcctagaagcttgacagattagcattcagagcatccgttgagtgaacaggctgtgaacctgaacctatagaaatcattactccagggggatgagatcaacagatctgatgagcaacagaacaaccaagatgaacagccccaaaacctcagaaatggtacacaccaatgtgtgggagacagattcataaggaatggggcggttgaagattctgttaaagccagatacttctgctggagggagttttaggctaagggtcatgtaacaattcttatatcatgggattccttctggggagaagcaatgaggttcaggaaattcgtggacacaaggatagggagaagagagcaaggtgaaagaggattgcggtgacaggagaaatgggagatattctttatgatcgtttttaaaggaaagcaaacattcaaaaataagaatcttatatgaacccaggtagctgccttcagttgaccaaataggtaggataagcagaatgatagagtgagaagagatttattttacaacccataaattttaattagtgcagtctccatgctcaagtttttaagattttcccctccttttggtagatggagagggaagaagaaaaaggtgtgccgaggcagggaaggagcagaggaagggaaggaagaagtcagtgggtggcagagatgcacagatacagccacctgagaggaagcagaggtgcgggtggaggggccctgggttcattccttaccgctgggatattggcaggtgctaggctgttgcagcccagatgttgttagggctaggagaggtggacaagtgggctgagggccgcaggatgcctttgagaggacgagctcagttagcagccctgaagactgtggtactgcccgggagcctgtgtgcatgttggaaatacggttcttaagggcaggtcagtagcaaagaggggctgttaaatgtgtcaacttagttcattcatcagaagaagagtgggagaaatagggagggaggggggaaagggagagagagaggttggggagagagtcagcgggagggggagagagaaagagaaatttggaatttttaaaggagaatttccacgtcagcctccctccctctcatggtagacaagcttcttgcaagtgcttaggcagaattatacctgaaaaaaaaagctggaactcttgaccttttctcatgttgattattaatatgagcagtgaacttccaacaatgagattttagcagaaatgaagggctgctgtcagtgcagtgctcatggtggagctctacaggtctctgcagcgccctagcctgcctctcctgctctcctatcacaggcagatgtgcgacggggaccctgcctacccccagccttggctccagtagcattgggcacagatccctcaggtgtccaggcttggcacagggtgcatagtgggagcaccctcaggatgcagttaggggagcccctctgcacagccacacctcgggcaagaagcaggtactgggggcagggtgcccaagaggagacccatgattgaatgactttttgtttatttaagttctgcagatccatggaaagcttcctgggaaacgtatgctagcagagcttctccccgtgaatcatatttttaagatcccactcttagctggtaaatgaatttgaatcgacatagtagccccataagcatcagccctgtagagtgaggagccatctctagcgggcccttcattcctctccatgctgcaatcactgtcctgggcttatggtgctatggactaggggtcctttgtgaaagagcaagatggagcaatggagagaagacctcttcctgaatcactggactccagaaatgtgcatgcagatcagctgttgccttcaagatccagataaactttcctgtcatgtgttagaactttattattattaatattgttaaacttctgtgctgttcctgtgaatctccaaattttgtaccttgttctaagctaatatatagcaattaaaaagagagaaagaggaaatgattcctgcgtttcttggaacccagaatacaaacccagcctaacatgcagcaagcctgctagaccttgtgggtcagagggctgggtccttgcctcacaggctgcctctgtccccttgcaattccattctatttctgccacatgccaagtgctatgacaggtacaaggcaaataagaacggtagaacacagcttcccccagcccacttccctgttctaaagacaccacatagacagagagcagcagacaggggccagcaggagctgtagttcagatcttcttggtcattccttgccgctgttatttgaacaaataaacacagcgcaaaggttaacaagtttttgccttctatagccaaaaataaaaaaataaataaattttga

SEQ ID NO: 395 - DNA, 144021 bp, Homo sapiens
accgccgccccgccctcggcggcacccacacccaggcgcgcccgcgcgcgcgcccggccccgtccctgtctggaagcacagctgaagatggcgagcccggcgcctccggagcacgccgaggagggatgcccggctcctgccgccgaggagcaggcgccgccgtcgccgccaccgccccaggcatcccccgcagagcggcagcagcaggaggaggaagcgcaggaagctggggcggcggagggcgcggggttgcaggtggaggaggccgcgggccgggcggcggccgcggtaacctggctgctcggggagccggtgctgtggctgggctgccgcgccgacgagctgctgagctggaagaggccgctgcggagcctgctcggcttcgtcgctgccaacctgctgttctggtgagagcttgggcaaggtgggggcgctgaggagggcaggtgaccttggggcgcccggggccccggggacccagtgcagggggagcccgcgggacactgcggaggaagaattgtcagccctgccccactttctcggccacctgtctcgaacaggtagacactcaccgcaactttcctccggacgcacgtccctgtgagcagttgtcgttctccgtgtgcggatccagcctcagatgcgaggtggtcggccgaccctcaggcacctgcacctacaggtgttcccatcgtgcttgaaaacttcgcccctgctttctaaaactctgaggtcttgacctgctcgcccaagcttgccggagcaaacgtgcttgaacgtgtcttggttcttgcagccccagcaggcatatctggaccagattaggtacccgttcaaaacggtgccgcattcatcagtcacctgagatgggccctgaatgatttgttttttccttcccctggagcgttaggtttactgtgtttactccctgatgagaaaacgggaggcaaacaagcaggtggagtatgcccagcacccacccccgggtgtgcacagtgtggaaaacaggcatatttttaggtgaagtacagggagaacacacgggaatgctcagcccctgagcaacaggtttgtctctccaaaaagcgctcttcagaaaggccagggaaatgtctgtctccttcgttgaaagtggtgtcctgtcatccgttaccacgctattgagggcggagaaaaaccttctttgtttgctaagtgtcctcataacaaacatgacctacacagtgcagaataatcagactccggtaacagataccttgttacaggacagagatttctgaaccttaaagttgagaaataaataaattgcacaaaatagacagcctgtcattttctaggttaacttgagcaagatgaatattttcctcagatctctgctagtcctggtgttttctcttaaaactagctgtatcttgtcggaggtccctgaaagtgaattaactttggatctcttaggtatctgtgtttggaatagagtttattccaaatctatcttattatggagtgaatgcgagcactcaaataagaaggacatattgtcttatgctagattgggcaatagtctaatagtcttagggctgtgtctcactaatgtttacgatgtttttaacattttatttctttttcttttctttctttctttcttttttttttttttttgagatggagtctcactctgtcgcccaggctggagtgcagtggcgcgatctcggctcgctgcaagctctgcctcccgggttcacgccattctcctgcctcagcctcccgagtagctgggactacaggcgcccgccaccacgcctggccagttttttgtattttttttagtagagacggggtttcaccgtgttagccaggatggtctcgatctcctgacctcgtgatccgtccgcctcggcctcccaaagtgctgggattacaagcgtgagctactgcgcccggccttaacattttatttcttaattttaaattttatttctttaaaaaactaatacagtctcacagtgcaaaagtttaaaggtacaaaagggtaagcattttgaaaatctctttctcatcccagtccctggccgcccagtttcctcacggaggccagcaatgttgctagtttcctgtgtctctttccagatagtgcacatttcagcaaatacaccatattctatgcaaattgtggaataacatatgagctcttccttttcctagtatttcttggtgattgcttccttgttctttttcagctgcttcagaattctattgtaaggatgtctcaaattacttaacctgtctcctactgaggcagtaatgtttccaagcttttgctatttcagcattatagctaatgaccctgtacatgcatcattttgcatatatgcaagtattttagagaacttcccagaagtggaattgctgggtcagagggcatgtgcacttgtaattttgatggctgtcaccatattgcatgcagctccttagggttctaacaatttatactcccaccagcaatgtgtatgactgcctgctttgccacactcttgcgaagaatattttatgaaactttttgatcctgcaaatctgataggtgaaaaagactatcccaaaatgattttattttgcagttctctgtgattgagcattttatcttatgtttaagaactaccacatttaccatttatcagcattgtttgtttataaataacctttgtctattttttcaagtaggccagtgttcttttccttattgatttataggagctgtttttatattaaagactttagcctaatttctgtaacatgagttgcaaacttttttctatgatgttttctttaatgacacctattgaaaataatgtttttgcataaaataattgaaaggcatatttgatagtatccaggggtgttttcttccatccattttatttatactgacggagaggaaaacattggccagccattcagcctagatacagccttctccttatctgttttatttcatctcctgtttgtggcatctgcattccatgcatgtattttctttgacaaaaatgactgtcctgttctttaagttcagaattacttgttgcttttgcattataattcattggaatttatgacccatttattaatgtcattaaaattttgtttttttttcccttttatttgttgctctgggggttaaaatgattttcaaggacattacgttttctttaaataatgtatttcttctcaaatgatcttaaattatgtgatactctaaccttctgtgtcttgggaactctaaagcactgtattttctatgagaaaaaaagatcaattttaaaactgtggggaacccaaccaaatctgtcttaagcaatgggatgttgttttcactttaattgatgtatttcatttttgtggaagtaaactttttaaagatatatttttgaatgatttagcacctggcattagcagtgggttttaggagtctgaatttgactcaaaagcttcaacatttattacctgcccattatctgcaagattttgggcaaaaattgtgacacagccgtaaccaatgggtataactaaaagttgcatgaattaagtgtggtggaagattcaggaaaggataattcattttgatatggttttggggaacgtggtattgtggatggaagagattgtggggttcttaataaggagatcatgcttaaacctcagtggataagaatgatttgggagatctagtagatgatcaagagcattctaaccctgaggaatacaatgaacacaatagcatcttgaaggtgtacctaatatttcaaccactacacagtaaacagatgcaatggcagcatgggctggtagaaaatgtagtgggagataaggttggctaggtggtttgtgggggcagtagttgcctcagatgctatgttgtgtgtttggatttgttttttctgtaggcaacagggaccaaaaaaaaaaatactttgtagaagtatccacaaataatttaatggataagtacactgtggttcatttatttattataaattgtgataccatataacaatgaaaatacagctttagcaacaacagggatgaattttacaaatgtaattttggtcaaaagatgcacaaagtaatatatgctgaatgattcaattaagttttaaatggtgcaggaactgaacaggattggttagggatacacacataggggataaaactacaaagaaaataaaagacattctcgaatccgagacgtgcaggcacacacacacacatatgcattcttatctatggtatattttatgaaaaatactgaaatatgaaaaaatgctaaaaaatgatattcatgagaactcagaggagtttggtaaaatagaggccacatagagtgcctgtctcaaaaagcagggtttccacaactgaagtagattgggtaacagtcccatagttttgtggtgatgaggggcctcagataatactatctcactcatttcaccaatgaagaacatgtttttagaattttttccttcatttaaaattttatttatttaaaaattaactaacatagccttacagttcagatgtttaaatgtacagaagggtaaacattttgatgtcttcccacgcctgtccctgtctacgcagtttcctctcagaagcaacccatgttgtacttgtaagcacatcctgaaatggaatgagcccaatgtaatagaaaatgttggtttttttttaaatatcaactttttgtggtttaccaccaataaaatgcccatactgtaagtatacagtcaaatgtatcatatgtgcctgtgtaaccatactggcagttgagatctagaatatttcatcacccttaaaggcttctttgcatccctgttctatcagcacccacccctggggactgatctgtttctgtcactgttgactaggttggacttccctaaagctttgtataaatggtgttatttagggtgatagggtgatgtccttttttttttttttttgagacggagtctctctctctctcccagactggagtgcagtggtgcgatcttggctcactgcaacctccacctcctgggttctagcgattctcctgcctcagcctcccgagtagctgggactacaggcacatgccaccaagcctggctaatttttgtatttttagtggtgacagggtttcaccatattggtcaggctggtcacgaactcctgatctcaggtgatctgcctgcctcagcctcctaaagtgtgtgatgtcttttgtgtctggctttgcttactcagcgtagttttgtgattcatctctgctgtgtgtatcagttatttgctgctttgtattgctgggtagtgtaccactttgatgatgtaccacaatttgtttatccatttgctagttgatgttccttcaggtagttttcatgtttgactattatgaataaagctattggaaaacatcacgtagaaatctttgtgtgaagtgtctgtttttggtgaggaaagtggtaagccctgatggttgccttggataggcacagaatggagtgaaaggtccgtttcctaagtcttgctgatcgctgtattgaaatttaatggcttatgatgcagctcctcttttgggcatgttacatctgcagcctagaaagcgtctctgatgtgatttttttttttattcaagttctagggtacgtgtgcacaacgtgcaggtttgttacgtatgtatacatgtgccatgttggtgtgctgcacccattaactcatcatttacattagatgtatctcctaatgctatccctccccactcccccgaccccatgacaggccctggtgtgtgatgttccccttcctgtgtccaagtgttctcattgttcagtttccacctataagtgagaacatgcagtgtttggtttttttgtccttgtgatagtttcctgagaatggtttccagcttcattcatgtccctacaaaggacatgaactcatccttttttatggctgcatagtattccatggtgaatatgtgccacattttcttaatccagtctatcattgatgggcatttgggttggttccaagtctttggtattgtgaatagtgccgcaataaacatatgtgtgcatgtgtctttatagcagcatgatttatagtcctttgggtatatacccagtaatgggatggctgggtcaaatggtatttctagttctagatccctgaggaatcgccacactgacttccacaatggttgaactagtttacagtcccaccaacagtgtaaaagtgttcctatttctccacatcctctgcagcacctgttgtttcctgactttttaattatcgccattctaactggtgtgagatgatatctcattgtggttttgatttgcatttctctgatggccagtgatgagcattttttccatgtgtcttttggctgcataaatgtcttcttttgagaagtgtctgttcatatccttcgcccactttttgatggggttgttcgatttgttcttgtaaatttgtttaagttctttgtagattctggatattagccctttgtcagatgagtagattgcaaaaattttctcccattctgtaggttgcctgttcactctgatggtgtgatttggttttggacccatggttggagaccatggcatttagaaaagtccatgcataggcctttttccttagtgcctgtggcattgcatgatgatggcattaccttctattggtataaatagtaaaactgtaggaaagtgatttgcctgaggtgtccacgcaggggcacccctggcgggagacctgggtcactctgacttttcaggcgtctcaggctgggcaccaggcagtcctgaatgccagcaggacctaccgagtcaaattgttttggaaggttgcagggttcaacctcccacttgatgtcaagcaccccttctctgccagcctgaatggggtgccccagcttgcgttagagccatggctctcaaagtgaggtcctgggctagcagcatccacatcaccagtgtcacctggagatgcaaaatcatgggcctcctccacactcactgaacaggaatctctgcaggtgggcccaaagcatctgggttttctccagctctctaggtgattcaatacatgttccagtttgagaaccattatgtttgagcactttctggaattgtgagctgtcttctccataaggcagcatttccattgctgggcggcactcactggtcagtgttttccttacatgaaggccattgcttgattgtctccgcagctgcccaggatgtaggcccctccccaggatcgccctttgtgtgtttcaaaatccattctcttcttggttcccactgagtcttctcttccccggctgagaaatcctgggcccttccactcaccgctgtcctgtctcgtttgcagatccttctggccgggcttcagttcatctgtattctgcctggaatgcagcattccttaggtggcctggccgctgcatactctctcccttcctcctggatggcgtccttctagcctcacagcctgagatagaatttctttactacagttgacaataactcccttttacagatgctactatcgctggttgttagactcttaaaaataagtaaatatatatcatttagtgctttgtcaaagtatggctatatgtatagttatatacagttacagttatatacagttacagacttcagtaaagtcaaactttactaaagttatgataaagggtgttcacatgtagcatcgtatttaaaccttgcaggaacccagtgaggcatgtgttgttcccattttacacaggaggaaacaggaggcccagaaaaaagttaactgaacaccaaagatgacgttgaccggtactgttcaatagaatgtttgtagtgatggacatagtctgcctttgcactgcctgttatggtagcttcctgtggctgttgagcatgtgaagtgtggctagtgggactcggaatgccatttgacttttatttaagtgtaagtttaaatagccacacaaggctagtagctgctgtgttagcatagtcttagataagtgctgaagctgggtaatgaagcagcgtccattttccctaaattcaatgatttttctaccccatctctctaaagaaaaataggagactattagggcttacttttttcaatattacagaatcatacttaatgatttcagcacagagtgaaaaaattatattgggagagggttgcttctgcatgaatgggaaggatctttttagactgtcagccagcctggtccaagttcctcgccttatctttgttccgtctgagtagtcggtacctgtgaatgagtgtctgctccctacccagtgtggtcaagggggtatacctgggcccagggggtataccagaagcccagtgcctgaactcagagagcctacccactggtttaggagacacagctgatttggtgaatcgattgagagagtatgtcacagttccaaattgcatgtcatggtctccagggctttacagttgaggacaaagtggggatgagggaggtttggaatagctgatgaaagtcttgtgagatttattgtataagcccagaagaaaaggtatagttttaaaagtgaggttaatggtgagcgatttccatgtaggacaaactcaggaagaaatgggagatgagcactggatgttgtcaggatggagagactctcctgactcacactgagggtctgttttggggacagataattaatcttgggttgccggatccacatgagatctgaaacactgtagatgttaaaaaaggtttggtgaaatgagctggactagaggatattcccctatggtgaataaggtggggctatttaaagacagtgagagtgggccgggcacggtggctcacaattgtaatctcagcactttgagaggctgaggtgggcatatcacctgaggtcaggagttcaagaccagcctggccaacatggtgaaactccatctctattaaaaatacaaaaattagctgggcatggtggcatgcgcctgtaatcccagttacttgggaggctggggcaggagattcacttgatttcgggaggtagaggttgcagtgagctgagatcacgccaccccactccagcctggacgacagagtgagactctgtctcaaaaaaataaataaaaaataaaaacagtgagagtggaggggaggggaggggaggggagatttatgtgcttgctagggggaatacccagaggtgaggctgcaaattcaaagggtggggccaggttttgaagaggttactattggaccatgctaaggaatttggatgacatgaaataagcaatacccatctattaccctaatattaataccataatattcctccctttctttcaggacctccattaaaatatacaacaagtatttctttttttgtttttttaaattgagacagagtgttgctctgtcttccaggctggagtgcagtggtgtgatcttggctcactgcagtctccgcctcctgggttcaagcgattctcctgcctcagcctcccaagtagctgggattacaggcacctgccaccacacccagctaatttttgtatttttagtagagacagggttttaccatgttggccgggataatcttgaactcctggcctcaggtgatctgcccatcttggccagccgagccaccacgcctggccaaaatatgacaaatatttcctgagtgtgtgctatatgctgacactgttcttggtgcgggggatataacagcggacaaacaggtgagatccctgttctcccagagcttatattctagtggtgaaagtggtaaaaaaaaatacaataaacaaatatacaaaatgccagaaaaggccggatgttatgaagaaaactaaagcaaggacaagggatagagagtgacagaagttactactttgttgggtggtcatcattggcctttcaggaaaggaccttgagtagacacctgaagagcaagtcagggaatgatccaagcaggtaactctggaggggagtgttccaggcagagggaatggcacacacaaaagccctggggtgggagtgggattggggtgtttgcagggcagcaaggaggccattgtggctggggctgggtgagcaagggggaaacagtgttcattcagctcagaacttcatgccacaactgtgccagaggctttttgtcagctttctgccagcccctctggatgaattaggggagcaagagcctggggcgaggcaccagctgggacaccattgcaggagcacatggtggtgcagagaggctgagccaaggtaagtggggttggggaagaggagatggatttggggtgactctggagataaaatcaggaggacagaatgatttggtgggtagggggagagaaaggctatgggctagatgacttaggctatgggctagatgaggagtgcctggtagtgaccttaaccaatgcaagggtggctgaggttgcggcaggctgaggttgcccaggtttggccatgttgcagtggacgtggctgtagcttaccaggtgaattatccacgtgtcactacagtgacacagactgactctcagagtgcaggttgagtttgaagtatggagttgcatgtgttggagtttagtcgttgcagccttgggaacgtgtgaaatttcctggggagagctgggggagagtgttggggagattgaattaccacagtgggtgaccagaaagagcaccttgagaaggagagtggcagcagaggggagttccaggagagggttgttctggagcagccaatgtggcgatcacgaatgtcatccagtacttgacttgcaattgctccttcctggccttagctgaagcgatttctgtaggggcctggtggtctccaatcacacccgaaggggaggacactctcttcctgtctccatggcaccacctcctcgctgcagtattgtggctcagtggaggacatggctatccactctatttctgggcctctctgtgttttggttctcaggctggctcctgacttggccaacaggaattcaagtagtttaggaaatcttttctctctgccatggtctgaatatttgtgtccccttaaatttcatatgttgagaccttctccccagtgcattagttttaagaggtggagcctttaggaggctattaggtcatgaagggggagtcctcatgagtgggattagtgcccttataaaaggggtcagaggtagcttgttcactccttccaccatgtgaggacacagcaagaaggtgccatctgcaaagcagagagtgagccctcaccagatgccaaacctgccagtgccttgatcttgaacttcccagcccctagaattgtaagacatgaatttctgttacgcataagccacctagttaatatttttgctacagccaccgaagtggactaagcaccctctctctaatgcttggccttcaccccaatgagataccttagtttgaatgtcagaagctacaagtccccagtgtttctatttgcagactcttaacaccccactccctcccattcttgttccattctctagatgcctggagatgcctgggtgggtattccaaaggacactagaatttgtggggaaagggactatggagaggcaaggtcaatgatatggtggaggaatgtgacagcgtgaagttctggggaggacgaaggggctaggtgagaaggacgccttttcttctgattcctggggacccaggggaaagatgggtatacctgtagtctaagtggcaaggagtcacatgtgttgtctgatttctctctgaaggaggatggtaatctactgcagttgaggaggttaaggcaggacaaggcacctgcagagaccggctgtaagctttagtggagaagcataaatgactgggggaaaatgctagattacacttttgttttgttttatttatgtttggccatttcttcagtgcagacattttatatcaggctcctgtgtcttcatctttgtcctcattgaccatttttttccaaggtgcatatataatggagtagtactagttttagtattgtagtcacccctatactatattagtttaacaataaatgtcttatgggaaatttcccatttgctaaagataaatgagtccaagatatccatgtacgatttcgaacgtacttttagaagcatgcagctgtgcagtattttaaaatgttttgccaaatgattcagtgtagtgctctttgtttgctgctgattccagtttttggaaagatttttgtctcagggatgaaaaaggcaatacctaagtgaaaacacattgggtgaggtgtggccacctccacgctcctgacggtaatcctagactgggagaaagagcatgagccacccacgggaggctggcctcccatctcttcccagacactcaccagacctttcacctgaaagatgaactcagatgacagagggagctctcctgagttgtggccacgtggacttcctgagtttctaggtaaagcattgtggctattgtgtattcagccattcttcttttgacaatttcgtggcacactttctgtggccttgcataattaacggaattcctgcagtgatccttgataatagcagtgaccatttgtggggctcctgctttgctaggcacttggtggagtttccttatttaattatcacaccacactgcaaggtatcattgccccatttggcagaggggatattggggctcagaggatttaagtcacttctcccaaggtaagggtatttggcagaatggggattccgatcaggtttctgctccccaccccgccccaataagctggactgcaaggggaggttgctgggtgtaatcagagcgtaattcaatatgacttcttccctctgcttctagaagacagagttaatttctttctcagatcaagccatcagctttcactcatagagcttgctatctccatctgctttacaggaaaaggttaatttatttttccaagtaaaatttcggcaccaactgtggcttcatccctgtagaggattccaccccaccacctttgttttccgttttaggcattgattaccaaagcagggtgtgtatttctgtgagttgtccagtggcccaatctcatcatatttcagttcccttttgtgtgtgctcttttgacccagggtggcgggtggggggtgggtggccctttccctacaggtaagatgtcatgtgggctctggcctgttcttagctgattgcactgctttgtggtgtagcgtgctgtgtgaaatatgtgatgtgggatgcgatcccaggtgaatctagagtttggggtaccgacatgttgtgctgaaggagcactactgccactctgagggtggggttgggctggggggctgggaggcatggagccgttatggaggcagcacaggagaggccacacccgccagtgcctcttctcacccactctgcaaagctgcgtgctctgtaggcagccgctctcccaccaggactgtgaccccctgcatctctgttccctgctctgtcccttccctgtcattagtctttcctgtcacctcttcagcgaggttgtccccagcctagactccatctaggtcttgcttgttaatttcagtttcagatctgcaaatattcttcagagactttggtgcaacttgaaggtattttgttaatttttctctgtgtttgtttttctaatcttaaagtcttgttaaaactctgggtatataatacttatatcccttgggtcaaagaaaaaaatgaaagctgcaattacagaatatatagtaaatgatgtggagaatactgtggatgaagatcagtctctccctcacacacacatacatctttaatatcaattaattccactgggtttttaattaaaatgcagcaatttcttaccctgtctcaccttacttcccagtcctgtttctaggagcgactgttgtttgttatgctcttggctctatattgacttttctaagtaaaattctgttttgtttgtttgtttgtttgttttttgagacagagtttctctcttgttgcccaggctggagtgtgatggcgccatctcggctcaccgcaacctcctcctcccaggttcaagcagttttcctgcctcagcctcccgagtagctgggattacaggcatgctccaccaggcccgggtaattttgtattttttagcagagatggggtttctccatgttggtcaggctattctcaaactcccaacctcaggtgatctgcccaccttggcctcccaaagtgctgggattacaggcatgagccactgcacccggcctctaagtgaaattcttaaaatgctggtttttgattcagcaatctaagacattaattttctcctggcaccccgattcacataaactcttctcatcccccttcccttgtcatgatatcagaagtttgggttaaagcattatgactatgtaagtattgttcatatataagctaagtagagtgtcatgtttacgtttcctttcttgttcaacgttgttttgctgttactctcagagttctcagcctcacggttcccagtgaattgggaagagtcccagagttcccaggaactcgcctcttagttcctctcagtttccatccttctgttctggtctcctctgataccccactgggctcgcttttcacttagcttaggacacgcccatcgtcgtcgttttccttctctcctgtgttggagtccctgatactggacccttgcttaaaacagggggtcaggacaaagtcaacatcctgaatggggaggcccccatttcttcttcttgagaatattcatgagagtgtaaggttttcttcacatttatcacgagttcttgatttctgtttgtttctcctctgttcctgaagccttccttggtgcactcctctgtatggggagagcacgttctctaggtttgagagagtacagaggaaatacatgttttgagaacttgtatgcggaaaacatctttatcccgctcttgctgtggatttcttgtctggcttgatttagagttctgggttgggaagaattgcccttagaaattggaagcatcgcctccttgtctccttgctcgcttccagtgttgcacttgagctggcgaaaggcctgccaatgcctgatctcttatagatgacctggtttttctccctggaagattctggggttttctcttgattatggatatttcaaactgatagacctctgttgatatttttttcatttattgttcttggttttatgaacagtctcagctggaaacttatgtctttcagttttggaaaattttcttaaagtcttttaaaaataatttcctggccaggtatggtggctcacgcctataatcgcagcactttgggaggctgaggcgggtggatcacttgaggtcaggagttcgagaccagcctggccaacatggtgaaaccctgcctctacaaaaatacaaaaattagccgggtatggtggcgcatgcctgtaatcccagctacttgggaggttgaggcaggaaaatcacttgaacctgggaagtggaggttgcagtgagctgagatcacgccattgcactccagcctgggcgacacagcaagactccatctcaaaaaaaaagaaaaaaaaaaaaagaaaattcctcctctttgttttttttcctcttttttaaaaattttgtttctagagacagggtctcgctgtgacactcaggctggagtgcagtgagatcatagcttaagcgatcctcccacctcagcctcccgagtagctgggaccacaggtacacactaccatgcctggctaagtttttaaaatttttgttaagatgggatcttgctgtgttgaccaggctggtctctaactcccggcctcaagcaatcctctggcctccacctcctgagtcactgagattacagatgtgagccaccacacccagcctgttttcttctttttctggagatcttactggtcaaacgtcagacttcttggattgctcctgattttctcagtttttctattttcatctctgtcttctgttctgctttcagaaagcttcttgtatcttttgcattctactgatttaaaatttctggtctcattttttgttccaagacattttcctcatttttgattttttttccttttagatgcgtttgttttgattcttagatttttctcttctttaataaaaaggagaagatagtttattcgaggttttcttgtgtgtgttctgagttccttatttctgtgtattttgtgtctgttaggtgttgaaggctttcctgaaatatctaaggggtcctcagatttcctcttcctgtttcacagtaaagggctccaaggctgagcgcagtgtgctgggctgaggagtggccacttcacagcgttcactgtgggtcatcagcatgctgacctctcctgtgggggcggggcagggaggggaagcctgactccgagtgttctgggagctgtgccagggagatgatgaacacgtgggggtccccatcagaatgtgcctggcatcagctccctgttctcagcgtggttcctctgccctgctctcttctgtcctgttacccccggggtctgaagcccttccactttaattttttcagagaacaacctcctacttctgtcggggtggaggagaggtcctctctcctgaccttgctgggtgggtagtaagatctgaagttctaactgttcatcatacagatttgtaggctgggcacagtggctaacgcctgtaatcccagcactttgggaggctgaggtgggtggatcacctgaggtcaggagttcaggaccagcctggccaacatggcgaaaccctgtctctactaaaaacacaaaaattagccgggcttggtggtctgcacctgtaatcccagctgctcaggaggctgaggcaggagaatcgcttgaacatgggaggtggaggttgcagtgagccgaggtcacgccactgcactccagcctgggtgacatcttcacacctgtcctcgcccctgccttctcccagttccttccacccccacgctttcctgggacctgcagctcagggggacgtgcttttgggggccttacccttgcacccttgcaattcccagcgctctttctgctgctcgctcagttatcaccctggagcttgctttccatcttccagatgtttgttgatatccccactgttgtctcctttcctgcttgcttttagcctcatgcatgcatatctttgtcagtatttttacttttgattctggcgtggtttggggaggaagaggagaaagatatgcatgttcagtgtgccatgcctgaccacagggctggcctccctacctgaatgctgcttccagcagagcagagagcagtctgttgcttcaggcatgtatcccagcaccgtggtatatggtaggtgctcagtaattgaatgggtaaaactttagtgacaccctctgctttttcatccacttcctcatgattcccatacttttgggcaaggtatccaagttctctgctcacctcccttgagaagaagaatttctcttttcccatttcttttccaaaatactgtgtggttgtgataattcctatccaatccaagtgcagcactttatagattttaaattaaaaattggcgtgatgataatttattactgagtagtaatatgtgtctagattttgaaaagtttactgattagaatattagtgaatggagtatatttggttctagctagtctcactaaagcatgagaatggcatttcattacagcatttctttttatttgtaaaaaatttacttattttttcctttttattgagacagggtgctgctctgttgcccaggccggagtgcagtggtgtgatcttggctcactgcaacctccacttccgggctcaagcagccctcgcccatcagcctcctgagtagctgggactacaggtctgtgccaccacactcagctaatttttaaaattttttgtagagatggggacgcactctggggtctcactcaactcctgattgagccagcctgggtaacatagtgatcctcccacctctcaagtgatcctcccacctcagcttcccaaagtgctaggatggtgagcatgagccactgtacccagcctgtaacatttaaacaaatagagcatgatttgtgaatgaaatgccccagtatcaaactctaaatcgtaggtgtcttcagcctaccttgatctgacattgaactttaactgtagtggtcctccaagatcttggtggggtccatcacttacaaaggatggttataaaggatggttaaaggtggttcttagtgtttaaaatctcttgggagagatgacatggaaagcagcaactagtttggtatgacaaatatgagtaacaggtatccaggctgctgctactatgggaaggaacagaagtcctccaaatctggtgactgcagggaggtcacacttttgtgagttgtgaatgctaagtagaagtggtttgggtgaatcaacgtaagcagagccttccaggctgaaggagtcacaaaggctccgagggtgacagtgagtaacacggccctggtttgtttcattagcaaatactcactgagaacatggtaggtagaatcactgtgctagacactggggacacggtgtcttcttccctcatggaactcacaatgtggggaagaaactcaggtcagatatcctttccagcacattcttttaagtgccatgctagcggtatgtaggaagggcagccatggtggttgtagtctggaaagacctagaagaagtgacattttagctggacgtagagagtcagtaggcgttggccaggttgctggggtgtgcaggggaaggatttgttccaagcccaagggagcagcatgtgtgaaagtccagagggaggagtgtggactgccaaaaatgtgcacagagttccgtgtggtcgggaggtggggagatggaaggggagggggtgaggcagggcaggaggtagggcacggtgaagagcctggaactggagtggaggggtttgggtttcatcctgagtgcagtcagaagcaggggctgcccagttccctccagtgtagttccttacccctggggcaaggaagtcgtgccagcggtcacaggaggtgaggctggaaaggaagcaggtccagatcttcaggggcttaggtactagttccaggactgggacctctttcaggcctggagaactgacgggccattacaaacaacccctggcactgatgtgattggttctttgtagaaagcacttgaggggcagtgaggaggggcatgtgggagacatgttggaggctgagagtggggcagcaaggggaagtctgttttctataggaagccactggtggggtcactcttgtgggtgggggaggaccaagggcagtgcaggttggaagtgcccttctccctgggagggttctggaggtgtggctgacttcaggctgagtgtggggccttgcccagtgcagaatgccatcctgagagagactcctggactccccaagggtactcagagtccagcagagaaaggcaatgtgctttttgtggcaccaaggttaggggttaagatttatgatgcttttggatttaatgatgaaggtacagtgacaaatcagtgaataaggataatgttacaattcagaactaatgggtgtggagcacttatcccgtgtcagatattttaggccgttcacctgtagtgtctcttactccatatacataacaactgttggaggaggtaggtgtcgttactaatattcacaatgacactgaggcacagagaagtcaggtgacttgccaggggcacacagccacacttgtgtggttgcaactgttttacacctgggtggcctaattgtagtttatcctctacttgctgggttattttgcccattatatgcatttgccagcctacttcttcaggattctttccacgtcctttggtgtagatgcatttttctgttgtctgacaaatgtcagtagtctaactattgactgatgacttctagtacataggtaagcagagaatcagccagactcctgtcctattgtttctcatgctttagatcttcagggcaagcttaaagcatttctttttgccttttgtacttccaaggcccaacatctgcttgcgtatagaagctgcataagatttttgtggtccattctctagttggaccattctttaggtgtgacacagggcttctttgtcacgtgtctccaggcactcacacagaaaacagcgtgagtggcattccctggagttgcagtgaggttgcctggctggatgttgtgggctttgctgagttttgccctggagggtgcgtgtcaggccaggtaattggcctggctttgtgggaactgccggatcctagaataggctgtgcttaactgaatgaaaagagaattcatactttggtctcagcaggacaactttcaaaacaaatattctagtctgtgattgaccaggatgcattgagttgagagcgtcactactgcttacattttaggtttggcttcgagcgtaatgcttaatgctacatgggtgccagtttccccttgtcagcttccaaaaagccactctggcagcttttgcatgtgttttgccagtctgcgtagcagggaaagaaatgtgcctctggagtggcagatttcagcaaaagaatcatattgaaatcatatcccagagctgcccagttctttgaaggcactagtctgttttcagtatttcaaacgcatcatggaagataattatttctatgatcaagttgcaccagctctgacctagtaaaccatattatttgtttcattggcagttaaaacctttcaaaagaaggcatccatatgatgaaatgaaaggagaggaaatctttgctccagtttaaccacctcgtgttacagatgaagaaactaagtcccaaggtccctcagctggtgacattatgacccatatcagagtctcctgacctcttttttaaactacatgcactaagtgttgagacagtgaacatgatgaaacttaggaaggcaaaataataatgttccctagtgtgagaatcactaattatattttgcaggtcagtgtgggaactttactgtattggcccaaccatgtctttggggtcttttgagggtctggagtattgacagatctcctcgtaatcttccaggaccctaaaaagctcttagctgtgagattcaggccgttgtctcagacttcaccatcctttcttgcccccctgacaaatgagcccgggtttgctaaaagtcactttgatataaggaggcagtcaagggcttcctcttgctcttagtagtaatagcttgtatttgatcacatctacttgaaacaggtgtttaacattcagctaatggtagtgtagccttcttaatgacgagagtaactccttccagaaaacttttcataggaagaatttttggcagttgaaaatgcatttactattccaaggaaacattttgttgtatgctcgtaactaacaagttattacttgtgtctgctaaaacaacaccaagacctgttaaaatggacatggtcactttaatatggtagttatattagtaatcataacacaactcagtgacttttttggttaataaattctctctgaaagagctgttgacctcttttaattaagctcttctgtagctattaaacataatacagggtgcctacaaacaaaacatacatgcactcggtgcttaaaaaaaagatctttctggtgaaataaaaacaaaatataaaaacaaggactattaaaggggtctattagaacagcaaggtttagggggcctcgtgtacaagactgcgcatgaccgccatcctgacgggactctcaccatgagtcaggaaatggcttcatggtttctggtctggggctcagttacttatgagttgcatagatccaaataccatctttgcacatggagaaaatggctcataagctgaaggaaggatattatatgaaactctcttgcaactgagtttctgtaacctggatgggtatatcttgggatattcactgcagtctggaaaccttacttcatctctttcttcattgttttagaaatgaatgtatgtcttcctggcataccttctgaatttaacttccaaataccttctggataaattgaaaacaacaccttgcatcattatgtcatctgtcacatcagaaacctttagtgagagacttttagccagtttgtgatggtagtctatgaaaaatgctttgtgtggttgtgttttgttttttgttttttttggagtcttgctctgttgcccaggctggagtgcagtggtgcaatcttggcttactgcagtctccgcctcctggattcaagcgattttcctgcctcagcctcccgagtatctgggactacagacatgcgccaccacgcccagctaatttttgtatttttagtagagatggggttttgccatgttggtgaggctggtcttgatctcctgagttcaggtgatccacccgcctcagcctctcaaagtgcacggattataggtgtgagccaccacgcccaactgaaaaatgctatgttaagcgtttaactttttttcttataaaagttgtctacatatttaaagatatttaacaatgacatttcacgtttggctcattttcattcagtcacatttaaaaatctattctaatacacttagaacttgtagctttcatttatcaaaatgaaagttgggcatcaggagaaattttgattcttaatcgtatcactgaatacagccaaaaggttcagcacccttgtacatcgatgcactgtatgactgagaagtttaattctgtgtacatgccagcttttgtttccgatggtgcccatcaaatctctgctgtgtgtaggttttgcctggtacagacaagttgtatcttaagattgtgagactgtgatctaatacattttgctgtgggcctgtgacattgaaaaacagtgggtgttggccaaagaaccaatcatgggctaccatccccagaatgtcagtgatgatctttggctttttgttggaactaccaggtgtctagaaagaaggccagacattcgttgtattcggatttggtgtggctttcacagtaaacatggctgcttagatttgacggaggtgcatctgctgcagctcctctggtgatagggacacatgagtcagcagagcaccattctctttgacctcagccacaccattgcaacatgactttagtatggggcaaattaggagagctagatttacttctcttggttatcagaggccaggtcttctgaaagagaagaaataagatttgtctaagcagatatccaagggccattcatgttatctgatgcttcccaaagggtctttaataaaaatggtatagacattttaatgttccccatagttttttttttcccccaatttggcaagctgtcattattatgataatgtgctttaaggaatttatgattaatgattacattgattacatgcatggttaattaattacattaattgaatcatttgtacaacaaatactgaatgagcaacagcaaacaaaaaagtatttattgagtgcctgtgattggcatgcagagacctagtgcttgggtgacagtggtgaacaggagagatggtcccttctctcacagagcttgtagtatggggtagggaaggacagacagatgggaaacaaatggccaagcaaaccagcatacaagtgggagtcagaaggcgtgctctgaaaggaaaacacatcactccgggggagcagtggggtgacctaatttaacagcaggctgctaaggagactgggtggagttttccttgctgagtgtgaccactgggcatgggatggtgagtcaggggttcactgttgtgcctttgccgagctttaggaagcaaacgccttttgtcaaagaatccacattttccttttctttttttttgaaaaacttttaagttcaagtgtgttatataggtgaactcatatcaaagtttgggctttgttgtacagattatttcatcacccaggtactgagcctagtacccaatagttattttttctgctcttctctttcctcccaccctccaccctccaataggcccagtgtctgttgttcccctctttgtgtccatgtgttttcattgtttagctcccacttataagtgagaacatgtgttatttggttttctgttcctgcgttagtttgccaaggataatggcctctagctccatccatgttcccataccggacatgatttttttttttatggctgcatagtatcctagggcgtatatgtaccacattttctttatccagtctatcgatgagcatttaggttgattctgtgtctttgctattgtgagtgctgctgcagtggactcactcgtgcatgcacctttatgatagaatgatttatattccttttggtatgtattcagtaatgagattgctgggttaatggtagtactgtatttagctctttgaggaactgccatactgctttccacagtggttgaactaatttacactcccaccaacagcatgcaagtgttcccttttctctgcgatcgtgccagcatctgttatttttgacttttttgtaatagccattttgactggtgtaagatgatatctcatggtggttttgatttgcctttctctcatgatcagtaatactgagctttttttcatacgcttcttgactgcatgtatgccttcttttgaaaagtgtctgttcttatcttttgcccactttttgatgggaagaagccacatttttatttatcaaaatagttcattcttttttggtacagtggacttgaagttctgatgtagttgaattgattgggattatttttaaaagactggctcgaccgagggcatttctttgttattattttacctctgtattcacttctcatctgattgaaatataagcttaggattgtgttgtagactctattctagtccagattcacagtgctgattatgaactggtgtcatgtggttgaagtgaggcattttcttttcttgttgctgtttcatgtcaaatgttacaaacacagacgctgtggcactcctttggagagcttgctgaggagctgccaccttcccttattatctattcttttattcttgttccctgcattgtttttcatgggctttgtctttcttgtttggagagtaaatatggcgctggaagtcacaggtggaattatcaggagagacagatgttttccgttggacttggttagggcctgtgctaagggagggcttcgtcccccttgtttaattagagaaagttgttagggttgtttgcacccctgtgtactgctcatgtgtgcacacaaagggagcagagatctgcggacctgctgggtaaagggagcactttctagcaaagccatgtgaattggtaaatggcgtgggagggggtggtaacacttctcatcaccttttcttttgttcctcctgttatagctcctttttgacaaacagggaaaagcattaaaaacaaacatccccagcgactcacttttaacaaatcagggtggtactgctgttcaagtcctcattctggctctcgggctctcagagtcagcatggggtggttacctgtggcatttgcttattttataggcttgttatgttttagtgattgattctttccatattaagaagatatggaacgtttcactgtgttagtttgtattcttctcctattgagttacaaaagggtttcactaatgatgaagtatcaagttcttaaccctaaagaggtcatctcagaaccagatttgtggctgtcttcctgcatctcaactatggcttgaattcttttgggctaaacttcagcctaagtcatctccttttcctcggtttattttccctttgccccaattccttagttttttatatttattctgtgctatgatagatatttaagttctctcaattggtttttggactgaggtgtaatagaaataagtgctatggaggcaagcaaatatgtgtgtgtgtgcatgtgtgtttgcatgtgcgtgtgtgggtatatttgcatgtgtgtgtttttttgtgtttgtgcatgtgtgtgtgcgtgtgtgtgtatgtttgcatgtgtgtgttttttgtgtgtgcatgtgtgtttgcatgtgtgtgtttgcatgtctgtgtgtttttttgtgtgtgtttgtgtgtgtgtacccaccggggagtaggggtttctgggaagaggtgagcttctagctgggtgaacccagtccaatgacttactctttcttagctttagttttcttatttgtaaaaattgggtaatgccatcacttcacaaaataacaacgaggccctgggagacagcccgcctcgagtccgtggcccatgtggattctgcagcacacacgccccgagtttcacttaggctaggggttctttttcagaatcataattttttcatttctaagatatttcattaagttttatattactacttgtttgtgctatttgctgaagattcttttaaaaatcaaagtgtaaaacaggacattaaaatattacttcacataaaagaaccttgaaggaagcctgacctgcagcttgtccttcgaggtgcaggttctgtgaattccaggaaacctggccgtacaggtgcgtagcctctgggcttttttgttaccgcaggcgctgctgtcgtgtgtcaaggtgtgtggtctccatcggtgtgggcaccatgacctgtgagtgtgaggggcttgtcttgccctgaccctcaaatactcctgagggatcctggaggtcccaggatcagcagctggggttgggggaacctgaagaattgaaagctgtcaaaaaacattcattctcatctgaggttcattctcagtttagaatgttctggaaataggatctagggaacttagaggaatggcgtccatgaggcagctgccagttctctctcatgcttgtgcacttggacatgagcatggacatcctcttccactcttagttgtttgtttcttcttttactttgacccataggagagaatcggagtgttttcctacctgggatgacacaatacagtctctggccttgaggtggccctgctcatcaaagttcaactggaaggtggccattggcttcagggccagagtggactttcctgatacttagtattggtgcccaaatatttgtcactgctttttactgtctcaggcttggccacagagtagcggggagttgcagcaattcctcatgcactggaattgacggccatggttctccccttccatgctggcaggtagaaaagaagacttgcattgggcctgggtgcagtggctcacacctgtaatcccaacactttgggaggccgaggcaggcggatcacttgaggtcaggagtttgagaccagtttgaccaacatggtgaagccccgtctctactaaaaatataaaagttaactgggtgtggtggcacatgccacctactcaggaggctgaggcaggagaatcacttgaacccgggaggtggaggttgcagtgagccgagatggcaccactgcttcaggctgggtgacagagactctgtctgaaaacagacaaacaaataaacaaacaaaaaagaaagacatgcattggatacactacaaactcctttttgaaaaaaaaaaaaacactcaagttttgaaaacatctttctccctgtgtggtcagggttgccgcacccagtgggattataatccccaagagtgtcaacactgttttgccccttgaatgtatccaaataaactgggacaacagtccgcatccaggtctggattttctatggtttcttgaacattttgttgttgaataagcaaagggggtggtgttttctaggcacaactactggatgtggggctctagatactaaaggaatgtctgtgtaaggaggctgctggcacagcccagcggtactgtgtgcatgcacggagtgacccgggtcagctttgctgggcagagcagcttcactctattgataaagggcacttgatcctgaccttcagataagtggcccccagaggatgacaaaattactaattcactgctcagtagattttgtatttgaggattttgaaacaaattagacggttgcttctctgtgtcctgtgttcatttagagcttagtaagtagggtgagcatataatttattgtcctaacctaagtaggccaggacacggtatataccaggatactgtggcctctctgatcttaaataacctgttggctctaatctgcatagtttcttacagctcgttcagatatttcagccttgatctcactttgtttactgagtgtagcagcatgagtgaatgtttgcctttctggcagggagtttgggaggatgtggatatgtcctcagcatggtggggctgacagggcacagcacacggcttgttaactttgacacaggagtgaccttggggccggcaggtgagtggtccacacacttggtgttatgggctgaatcgtgctgcccccaaattcaaatgctgaagtcctgaccctcagcacacctgaaaaggtgattatatttggggataggacctttaaaggtagtcaaggttacatgaggtcacatgggtgggccctgattcaatatgactggtgtccttatgagaggcagacaccagggatatgtatgcaaagaggaaagaccctatgagaatgcagtgagaaggcagccatctgcaagccaagaagagaggcctcaggaaaaaccaaacctgcagacagcttgatcttagacttccagccttcacacaaattgtgagaaaataaacttctgtagtttaagccaccctgtctgtagtgttttgttcttgcaaagtaatacagttggcccaagagatgtaaaagcctcagtcccagctctggaagtgatcgctctggcctcagactgggagcagtggggaggggggtctggacacatgaaatcttactgtggagcccaggaacttggcaaggaacagtccactgtatgtgtctgtgatcttgaacagtgggttattagggtgtgatcaagattcattcacctggaaagggattggctggagctgggtaagcagacctctggcagggcttccggcaaagaggggaatgagaaggatcaggcttgctgcgggagaaccaggcagaacaattgagcacacccaaggtaagagtgggtgccacatggatgcatgtggccagagtctagttctttgcatccttggttggagttggagaagcaaaatcatcttctacagctgtggcaatgccatcaatctcagaactgtggaatatctgaatttctttttgggaccctggacagggtcaggtatattggaatgggttcttgaacagactgtagacatgaactgatgagtgggtgaccacaactgaatgaggatttgaaagatagacgtccacatgacaattacttttcaactctgctctctggaacagtctggtacattgagattggtttattaaagcaggatgccagggaactctacaaatgatgtttaaatggagcggtggactctgagtcaagaagacccaagtttatattctgactccatgatttggacaaattgctccaacctaatctatttatggatatataatttccatgtatctaaattcatcatgttgtttaggaacattacatgcgatggagatgtgaaaatacccagctaaggtgggctttgattacacatcaactttttttctgtagtgggcatgcctaggacggttccttgaattcattactgtgtgtcttgcttctctccccatcactcacccaagagctcttcttctcagaagccttttcagcacctatcactatgccttattcccagttgcaaaggactgagtgtctccttttgtccccgcattcttatgttgaaaccccatcaccaatgtgatgagaggaagcctttgggagctgattaggtccggaggatggagccctcatgaatgggattagtgccctttaaaagagaccccagagagatcttttgccccttctaccacgtgagaacacaatgagaagttgccatctctgaatcagaaagcaggtcctcaccagacactgaatctgctaaggccttagtgttggacttcccagccaccagaactatgagaaatagatttctgttgtttataagccaccctgcctgtggtattttgttacagcagctggaatggattaagacaccagtatgtgcatgtgtttatgtgtgaaggaagaggccccaaagctcagtttaatatttggatctgttacaccgcattctctagaactagagtttatagaatcagataatatttgaatgggaaaggccctgagacaccttcgcagtccagtggtttgcaaatctgactgttagcatgtaggttcctgtacctctccttggagctctgacccacccagtccagagtgggacccaggaatctgcaatttctaaaaatgcttgtgaccagtcgaagtaaaaaaaatgccccaagtaattctgatgatgatgaggcagttttaggaagggcttatctagccagtgccttaatttaaagatgaaaataccgaggcagaggatatggaggtgtttctcactggccatgctagaccttccacctagctgtgattaggatcccacattcatattgtaagttcccactgggcagacacaaagatgccatttgcataaaagataaaagacacaaagatttccatttgcataaaaacccagctgcccattaccatggcttcctgaccttcatgagtttatttcttctttcttctccgtacctcctgccacaccgtttctttctttcttccctcttaccatcctgcacgacattgcagtgtatgactttgatctgttattcatttttcttatagctcctttctatgactgaatctggtagttagtatttaacttatggctagctgatatagtttggatatttattgctgcccagatctcaggctgcaatgtgatccccagtgttggaggtggggtgtggtgggaggtgtttgggtgatgggggtggatctctcatagcttggtgctgttctcaagatagtaagttctcttcaagatctggtagtttaaatatgtggcaccccctccccacactccctcttgccactgctcccaccatatgagatgcctgcttccccttcacctttcaccatgatcataagctttctgaggcctcatgagaagccgagcagatgctgaccccatgcttcctgtacagcctgcagaaccaagagccagttaaatctcttttctttataaattacccagtctcaggtatttctttagggcaatgcaagaatggcctagtacctagctcagctggagtgggctgcagaacttgactcacccgccctgcctcgaagtccccttccctgctgtgaccaggtcaggtagaaggtggaataggagtgggcaggtattcaatttatacactaggtggagctaaggagcacattgcactgccctagggtgcccctgacttgatttacccatggcttttctcataattccagtgcaagggtgcacagtagagcatgctcagtttctctttgccttgacctcagatggccttggttccatcctagccatgcccttggtttctcctactctttaggcacaagaacgcaaacagaatacaaactccctgctgctcctccccactgtcttatctgtttgtccaccatgccttgctgacctgggcacattccctgaattcactggattatcgtgatgtgcttctcctagagtaaggttattcccctcctccactgcagcagactctgattgttactacccaccatttccctgtgattgatatcttccagaatttctcatctctttagagaaaggagtctattacctaccaccctcttttcctctcctctgatgcttataattcattttcttggccatcacaactaaagaagtacttccctagggaaaaaaaaaaggcttctgagttccatttaatcctggatttgcaattaaattgttattgctttatctcactccattttcggatgatcgtcctttccaaattatttaaaactatatattcatgtttaagaaatgtaccccccagccaacacacatacatgttttaaacagctctgaaaatgggatacatattacaattgagagggtctttatttttttggcagctttttttccttaatagtgcacaatttaatttcacacagcatcttcagttactaattttgcagaatctgcataaaaggccaggagaaattaaagccaactttagttgaaactctgaattttgtgatattatgatagatggctgcaggtatgtctaactcttgagaagataattatcttccagcaaaatgtgatgatctggactttgaataatgtttggtaaatcattatgccttacgagacccttttttctttcacaattagagccaccataatattaaataaagccaggagatgttaagaactcagtttagggctaggtctacagttatatatatttcattttttaaaatcatttattcaatatttaatgaacatttaaattgaatggagggattgctacttgaccgttaagatcctttctggatttcatattcagtgattctgattttctgtgtaaaatcttaattttttaaatttcaatagatttttggggaacaggtggcatttgattacctgaataaattctttagtggtgatttctgagattttggtgcacccatcactggagctgtgtgcactacccaatgtgtaatcttctatccctcacccccctccaccctttctcccaagtctctgaagcccattgtcattattatgccttcgtgtcctcatagcttagctcccacttatgagtgaaaacatacaatgtttggttttccattcctgagttacttcacttagaataatggtctccaattccatccaggttgctgcgaatgccattatttcattccttcttatggctgcagttatgtatatttcagtaaaagaaagtgaaaccctatttttggatctccattttaagagttacagcaaataatgcagattcatttccatataagaactctgaagagttccaatgcttttatccatagatggtctttctttgaagacaaaaaaaatatgttttagctgttgatagcattcatttcatagtacaaaatgggttgtgctttactcagaaatgagggttagatttttacacatggaaagaactaagtcttgtgttttttatccattatcaaacaagatttgcgtgtgtatgaactatttttctttgctttataggaaatttatcctattaagccatttaatttggccttgcaaaactcatcatggagtaatggaaaattttccttgtcaaatggatacacgactagtcaaaaaattatacatatgtatattatatatatgtaaaatatatatattgagacagagtctcgctccatcgtccaggctggagtgcactggcgtgatcttcactcactgcaacgtccagctccagggttcaggcgattctcccacctctgcctccttagtatctgggactacaggtgcatgccaccacgccctgatacttttttttttttgtatttttggtagagatggggtgttaccattgttgcccaggctggtcttgattgaactcctgggctcaagtgatccgcctgcctcagcctcccaaagtgctgggattacagctgtgagccactgtgctcagacaaaaaatattttttgtagttagccactgagtgcaggtcaacagaaggtcactcgagtaccttcactttatttttcatcgtgtaaattgtccacatagcccagcacctgtccctgctctctggctggcctggctgctttgctgtgacctcctgcattgctgagcctgagcaggcacagatgtctgcccagagcagccgcacctagagctccatgtgggtatggaatgctcaagaatcaataaaggcacaaagaggcacaaggaagggccaaatggcaggggtccgagtgatccatgtagagagagggaagatgctggcttacccaagagtaaattattttgacagcccgtcattttccctgatgggcatctttgtggaacgagtgccctcactctcggggcttctgagcggccagtgcagactaattttgatattcgtcaaagcctggaatttgataggaaaatgttcctcttaaaatcatggtgtgttctgatatggaaataagccggggattacccaggccgtttttttttttttcttattttattttttaaccatgagcagagggtttcccctgacagtttcgaaactttctctgcatctttacctgctgccctgacactctcctttgtctctgagcataaggaagggatcttaattcttccctgacccagatatctgaatagagaccagtcccataaactatcccgtcaataccaagtgggataaggcagttggttacttgaaaaccagattaaaattcaaaataatgttactgaatctgggaatggaatagaaaaaaaaaataggagaaataaaaaatagtaagaaaaaaagcaaatagacacatttatcgaatataggccgtggtcatcacaagccaaacatgagtcacctgggtgatgtggtttcttttttagagcaatcatcacattactatatagaaataggccctaacttgctaaaagaacgtgcatatggtgatttagagaactgtacctttccaatcgtagctaaaccacacagtatgtctttctatgacaaatggggtatttattatacacatagactttatgtatttatgtatagcatagaattgtcatatataatgtttacctatcatgatatgtatatgtatattttaatggtcatatataatgtttgctttagtttccaaagtttgaaatacgcttttcagataaaagttgtatcctattcaaaaaatagctaatgcatgctggacttaatacctaggtgatgggttgataagtgcagcaaaccaccatggcacatgtttacctatgtaacaaacctgcacatcctgcacaggtaccctggaactttaaataaaataaaataaaatattttaaaaggttgtattctattcagctaaaagaacatgtaactctcactaaataaatggtattttaatttaaaaatgtatcgttttttttcttttaattggttataaaaaggccatcaatctatagagagatgtttgtgatggctggagacttagggattggtggaaatattgcttctaatcacttgggttctaggatccattgatgtggtcacaagtgcctgggctaattcggataaagacaagggccagtggtcctgtgtgtgtgttttgtgtgtgtgtgtgtgtgtgtgtgtgtgtgtgtgtgtgttgtgtttctgaacttaaaaagtattttaaggataaaaaagcctttattggtcactgtgatggggatcttacctggaagatccagtgaggatggggctggctacatgggagagtgacctagacagccacacagggcctggggaaggccgtcacttggggatgaatgctctgtggttgtcatcttgtgattcttatcactgtgttctttgaatttgtgttttgtaagtgaagtgtgatggggcagtggagcatgcacaggggattggagcctcagctcacgtgcagtcctgcctccgactggcctccctctccatctccccattcccgagaaagggttcttgaccacccacttcttgccctggccctgcccagcctctcccttccaatctcaccctgtgtgattgcccagggcagtggtcagttgcatcaacagggaggcttgtgttccactgtggctgtcaaccccttgagaaggcctgaacatgaggggctgtgtgccctgcagctgccaggcaggtggtgactgtcatcacctaggctggcagcaatgtggtgcattcagcgggtgactaggcacgggcctctcacctgtcctggatccaggtcctgaacatgccctggagtggaagttgcaatatcttggggatgccccatttgtctgggaagggggttattgacttccttagcccaggtgaggtctctgcattttcacttatcctgggctttgaaaattaaggcaaccctctagtgaggatggcgcacatgcacagacctccctcttccaagtctgtactcgatcgccctgccctcatggtcttctgggcagcctgtactttgaccacactccccctcatgataattattctgcagctttccagagccctctgacagcctgtgtgtggctattttcccttcggaattcctccatggttaccacacgtttctgtggactctgtgaatgggcagatcagcaaggtaaccctggggctttggctcaggctgcaccccatgatgtttttggcagagtctgatggtatttagttcttctacagagaactattacatactttaaagtaattttcagcagcagtcaagcaaatctgcacttatagacacttagcccttcagaatgctggaggcgtcagcaaggtgtttcagaaaagctaattctgtctttgtggataagatggaatgatatgggcaagcacatagtggcagactggattgtctgctgactagtaatctaggtcactctgctaatagggagtgacaggactccagtaccgatcaatagctttgatcagtagtgtggatgaggactgatgacgtccagatagaacatgcatggtgtcctgaagctggacaagagaacagatgtgattgatgtcaccactaaagtccataggtttgaatgtaggacgtgtcaaacaagaacaaactgcataggacatatttagattcaaaaatggtatctgaaaaatagaacccttggggattttaactgcctgtgaattcaacttcagccagcatgctgatggaactgttaaaatttttttaaaaagccatgccaaaatgagttgaaaacttatgtccatacaaaatcctgcacgtggatgtttatagcagctttattcataattgccaaaaattggaagcaaccaaggtgtccttcaaaaggtgaatggataaattttagtatatcttataatggaatattattcagtgatcaaaatgaatgtactatcacgccacaaaaacactcagaggaagcttcaatgcattttgctaaatgaaagaaaccagtaggaaaaagccacatactgtgtgatcacaactacagaacattctggaaaaggcaaaactatggagacagtcaaaagatcagtggttgccaagagcttgggcgagacagggatgaatagatggaggacaggggacttttacggccagaaaactattctgtatgatactataatggtggatatatgtcattatgcatttgtcaaaacccatagaatgctctaaaaactgctctaaaatatataaaaaaagaaaaggctgtaaattggtgccagtccttccagctcttttcatgtgggagcaggcagattaagaggcagacacttgtgtccagcagccgtttagcagaatggcaagagctggcttagagccaggctgcctggattcatgtcctggtcctgcgtctcctttgtcttggggccttgagcaagtttctgagcctctttgctcttctgtaaaataggtttaatgacgatcccttcctgaagggatacaggattcaatgagtgactccatataaagctcttagaacagtcctgtgctcactgaaaatcagctgtgctatttatcctgcatttggttctggaattcataacttgtgcctcagagtggaggagacaaaggttaagggtaacctctctaattcaggctctagtcttgtggctctcttgcggttccctttgggtaccctgttccccagcctggaatgcattggtctcttttctacctggccaaatcagatgtctttcgaagtcaaagtttagatgccaccttctctagagctttctctggctgctttatgtagttactggctctgttttctgcccccacagcatcctgaatagcactttggttaaacacagttgtttacctgtctgctttcctggctttgcagggggaaggctgggatttagtcaccagtgttttcccagcagctagcccagtgtgtgacagatgctgtgaatggaatgaaaacagaattccctgcctcccccagtaataataggatgctgccggaaattgaatgctgcaagaaatgttgagcttcctggcatgagatctatttaagtagaggtggttgattgcagctgaggggatttgtggatcagatgaaagtaaatcagatgacctctgagctccttccagctctgtgattctgtgacagtccttctctgagtgatgccacagcgtgccagtgtcaggatcgcccacgcccagcagatggggattgttttttgatgtccttacaggccagtttccatgtaaagatcggttagaaacaattttgttcaattactttttaaagaaaaattttgattttataaaattacaaacttaaaactcatttttctttgagctttccattttagctaacaaaacattattttgtttataaatctagcaaattgtaaccgtgttcaagagagtctgactgtttcattaaataataaatgattgctttattaagtgattagttttgttagaaagttgagttatattcctttgaacattttaaactgcatttgtaaatgttatattttctatatccctttgaagtactttattatcagaataactaaggttgtgccaaagacctgagaggcgacctgaataagacggggtagctggagcatcagtaaggataactctgcagtgactgaaacacgtcaaatatgttcaaactcttgagttcataataacaggaaaaaaaggaataagaaaacgtatgagtctgttttcacgctgctgataaagacatactcgacactcggtaatttataaagaaaaagaggcttcatggactcacagttccacgtggctgaggaggcctcacaatcatggtggaaggtgaaagacacgtcttacatcgtggcaggcaagagagaatgagagctaagcaaaaggggtttcccctgacaaaaccatcagatctcgtgagacttactcactcccacgagaacagtatgggagaaaccgcccctgtgattcaattgtctcccattgggtccctcccacaacacatgagaattaggagagctacaattcaagatgagatctgggtggggacacagccaaaccatatcagttacctttagaggacactagggaactgcttcactatcttgaaaaaaccggtaaaataaagggaagaactcaagaactgatgctgcctttccgacgagctccacctctcagtgtaattggacattgatgaggggaagtttctcgttataactgtgatccagctattactcgaagcaggagtgaagggccgtcaccccttgtagcctctgaggaatcagccactagacagggattgtctgtggctgccaatagtgcaagtgtagccaccaagacatccagacagtctgcgtgtctcttgatggaaacaggcactaccacctatctttgggttttagagggaaaaaaaaaaaaaacaaacctaagtcttatcaagcctctagatccacgtgccaacttataggctacacaaaagatcaaggaaaatgttaaaccaaatcacaaggatacaacaaacgattcccagaagctggaaaactttattggagaaatgaacctgacagcaagggacctataagggtccaggacacttaaaatccacatctgccaatttcagcagatgactttctcagatcctgtttcagtctgtgtgtgtgtgtgtgtgtgtgcgtgcacacaaaaatgagtggggaaatatgaaccttgatgggatattcgatgacattaagaattaaagtaattttttagatgtgatggtggtattgttatttggttaaaaatatcttgtttttggccaggcgcggtggctcctgcctataatcccaggactttgggaggtggaggcggggggatcacaaggttaagagatcgagaccatcctggccaacatggtgaaaccccatctctactaaagatacaaacattggccgggcgcggtggctcgtgcctgtaatcctagcacttcgggaggccgaggcaggtggatcacctgaggtcaggagttcgagaccagcctcaacatggagagaccccgtctctactaaaaatacaaaattagccgggcgtgttggtacatgcctgtaatcccagctactcgggaggctgaggcaggggaattgcttgaacctgggaggcggaggttgcggtgagccgagatcgtgccattgcactccagcctgggcaacaagagcgaaactccgtctcaaaaaataaaaaaataaataaataaaaaataaagatacaaaaactagctgggcatggtggcgtgcacctgtagtctcagctactcaggaggctgaggcaggagaattgcttgaacccaggaggtggaggttgcactgagccaagattgcgccactgccctccagcctggcgacagagcaagactccatctcaaaaaaaaaaaaaaaaagaaaaagaaaaaatcttgtttttgaagataaatggcagtatttgcagattaaattacatgatgtttgggatttgcttcaaataatttcgggggaaggatgagcttagtgggtgggaatatggaagaaacaagattacccatgaatggagaattgttgaaaccgggtttattacactctggcctctctttttgtgtacgtttgaagtttaccaaaacaaaaactttttaaaaattccttcatctaataacacaaaccctcccaaatattaggtactacttgaaaaatgaataaactaaagaataaactcatgtttgtaagattttaaatttccaatcacaagtctaaattactcagctacatattttgaagtggagccctgagacaaatcatcttaaacattataaataattaaagtaccaaaagtgctcagatttttctaaatacagattattctcttagggtttcgtttctcaaacatgtttatatgacactaacccaccaaagaatcaaatatgtagtcccatacagtttggcattaccttgctaagcaattgctgggcttgtcttctcagtggaccgaggattctcgatgaccaacaagaccttggccaatatgccaactgggcccttgcccaggacagaatagacagacatcccgagtgctctttggagttgctgtggcaatgccttccaaatgaagtctggcagccaggcctgtgggttgcagtcctggcattacctaattttcttttttattattcttggaagtttgtaacttccactaagagaataactaatggcctttgtgctttggttggttttgcatttcattggttttgaaaagatgcttaaatggcttcctggccagctccaaagacttttaaacttgagggagctttctgtctgtgctagggctttgcctgaccctgcaaagaaagccattctaaggaagcatgctgttcgaacatttgcaggttctgtctcatgccatgtgagccgagctgcgcattacagctcattagtgggccctgagtcaggcgagtgattcacagtcagcatttaaacgcgtaatagaattgaatggaaaaagttgaactgcattatgaattgtaaggaaaatatttttcaaaacttgtttttcatttatatgtatgtaaatataaatgagtttcttattgtgggtcactatgaaatctgccacttcaacgtgaggtcgggaaaactgggagcacccagcacatgaacaagagcaagaatgaatcctgaattgagagtgaggaggctggccccaaaccaagcaaacaccagaatgcaaccttgcttaaaacaaacaagagctacaaaaatagagcaagtggtggctccttaggggagggacaaatttagtggaggaacaaatgattgttgctaaagacatggactgcggcattttattctgtaacttgtgtcttttatgtctgttccatctttctatgctcctaattcaccactcccttttggtagcacagtgcttggtgcaattaggcaatcaataaatatttattagatgcaaatactagtaatcaaaccacctgtttcagggggcctgggaggaggagcctggggcctgggaatctacattttaacaagttttccaggcagccaacctggcagcagttgcagactgttatttaagaaacactgacctagtccacctgctcattttgctggcccaggccatacaaacagcatttgaaccagtgagagcttgggttggccaccttctggtggagggctctacccaccacgtcacccagcatctcatgttgatctgcttttcaccaaacatactgcatgaccttctagtaggtggtctggactccatgcttcctccctaccccgtcacatccttcctgttgccctcagacatttccctaaatcacccatcatttcacttccctgctctatacctttgactttctctctattgtttgtagcataagacttactgcgcattctgcttgacacagtcttccctgatcctatctccccaatcttgtctctctgccagtctctgaaccctcttcttttgctttctcttcctgctgaggcaccccagattacttgatgtgccacaggtacctcaccctttcctgagtctgatctttggttcatgttgtattctctaattggaggagcctctattttcatctgagttgcatccacctccccagacccagttaagtgccgcttctataaaaacttcccagccgggcgttgtggcttgtgcctgtaatcccagcactttgggaggccaaggccggcggatcacctgaagtcaggagtttgagaccagcctggccaacacggtgaaaccctgtctgtactaaaaatacaaataaattagctgggcgtggtggcagacacctatatttccagctacttgggcggctgaggcaggagaattgcttgaacctgagaggagaaggttgcagtgagccaagatcgtgccactgcactccagcctgggtggcaagagtgaaactccatctcaaaaaaaaaaaaaaaaaaacaaaaaacaaacaaacccaaaaaaccaattaaaaaaaaaaaaccattccctgctttggagcgaatccatcctccctctccctgtgcctctccttgttctctgcacatttctgtgacaacacctaagccttgcctgccttggactttgtgagcttggcctgtgtttgtctgatgagaaagcaagtttgcagaaggcagtattcgtgtgttctttacttctctttatagccttgcaaacagtcttaaacatttattaaattaatttttctatgagttctgattctatcaaagttaatattcattggcagcttggccaattaacttgtgtaaacagacctctaatctcatgtgaaggctcaacgctctttgtgatttctttacaaacacacccaaaaaaagcactgcagggtttgtgtgctgctcacggtcaataatttttagtttgtttccctgcagagaggaggtagacaggtagcaaaaggggagcatgatcttaaagcgaaagagttagcaaagtggatcttcaataactgctttttttttttttttttttttttttttttgagacagaatctcactctctcaccaggctggagtgcagtggtgcgatcttggctcactgcaacctccgcctcccaggttcaagtgattctcctgcttcagactcggagtagctgggactgcaggcgcacgccaccatgcctggctaacttttgtatttttagtagagacggggtttcaccatgttggccaggatggtctcaatctcttgaccttgtgatccgcctgcctcggcctcccaaaatgctgggattacaggtgtgagccaccacgcccggccaataactgctgtttttaagagacgagggtgggagtagttagagaagtgaatagggcgtaaatgaaaacacaagacagggtggtgactaaagggcctctgtagtgcagcccatccgtgtctgttagagagccctgcagcttggctctgcagcccatcctaactctgtttcaggtcacttccattctccatcggctattggagaagcccagcactaggagcaatattttggtctatgcctgagatagcaaatcctctgcccgaaattggagggtagagcagaaagcttagcacaaaagcgcgcaggctcagacactttcattttgctgactttgatgcctattaaataactttcatgcagtcacactggggtgattttggaaagtgaaatcatgccaggcacagtggctcacgcctgtaatcctagcactttgggaggccgaggtgggtggatcgcttgaggacaggagttcgtgatgagcctggccaacatggcgaaaccctgtctctactaaaaatacaaaaatgagcttggcgtggtggctcatgcctataatcccagctacttgcgaagctgaggcaggagaatcacttgaaccagggaggcagaggttgcagtgagccgaggtagtgccactgcactccagcctgggcaacagagcgagactctgtctcaaaaaaaaaaaaaaaaagtgaaatcattattgaataccttttttgtttctgtggcaggaagtaaacccaattttgaaaaggttaaaaatcctcaaattgaaatactgatttgtgtttcgctgttgcaggttccttgcattgactccatggagagtatatcacctgatttccgtcatgatacttgggcgtgttattatgcaaataataaaggatatggttttgtctagaacaagaggtaagaatactcagattttatttatatggtatttaattttctagaccctgcatttctgatctttgtgtaggcatattagccaattagtcctttgaacagaagcaaatataggcattgacttagctgttttcaatacgataatttattgaggtggtgctgtctttgtagctactgcttgtaggtaaaaggtttgtgtgtgctggtttttctcttggtcttaagagctattttaaataccacgttggtatttaagtaggctgcagtgaggataacagttaaatatttattacatctcacatgatgaaactgggccactggaaaatggactagtttatgtaaaaattttctctgcctcaatgaagaaaaacaactaattcagggtttaaaagcaagcgatggttaaataattttaaaaaatgagttgataataaaaaatgaataaattttaacattaagtttaaaagcaagagcttggtttaaaaaaaaaaaaaattggcctgaggtgctttttgggtaatttaactgtattacaaatctgactcaagtcttttgcatacttggaggggcctcttgtaccactgttcgagctagtttttgtaaacttgggaaaagccctcctgagaataattaagccccataaacttaaatgtaatgagatagattttatcagaaatagccaccaggaggttacaaagagacatttaatttcactaaatgcaccccaaatggagggatgcttttggtggaggtccgtgtggactgatgtgcatcagagctgcctggattatagtcctggcagggatatctaggcctgccctatgggaggcacccatctcctccctgatggcaactagaagccagcgatgtcagctggtacggatttactatcatggtgttctagggatctgcttgaaatccagttataagtctttacagtttttaaactcatcatgtaaaccatctttagattgttttatattcgtgtgtttccaggtttgaagatatttccttcccaagattccaggaaggcaaacaaatttggttttgtgcccttagtgctttctgtgaatctgtggatttcagttgtattcttcaatgcacttttccttctctcccttttttccctctctctccatcttcactttccttttttctgtttcagggaacagacacctaactccccaatttcagcccaaacaggcacttgttgtgatacttgtttaccacacacgtatccaggctgccttgaggtggggcatctccatgcatcagggtttcatgccagagttggtctgtggatcagtccttgatgattcttatttatctgccttgactcatatctggtagagcagagcctgttttcctaaatagacagtaatatgttcaccctctacaggaactccctcagggaaatctcaggacataaagccactcatacattttatctgcaaccattttatcttggtgtagagtaagctaaacatggacccaggaagcaagctgagcatctgagtgttttcagtgtttcctcaaatttggccctagtctgggcacaagttataaggaatagacatgtgtggaaggccaaaggcaaagctgaaagactttgcaactgtctttttctcactcctggcccctcacacacagatcgtttccgctgttgactcatgggcttgatattcatgcagatgtggaaatttcatactcacaaattgcaggaaacctttacattgcaagaattcagtcctttaaaaaaattaaggtagtagaatagaaagaatgccagcctaaagggcctcatttttgagctagttcattccatttcctacctgtggagaagccccatgatagactgcatttgtttctgtggctgttgtaataaatgaccacaaacctggtgtttcaaaacagcagaaacatcttctcttaaagttctgaaggacagtagtccgaagtcagtgtcactgggcccaaatcaaagcgttggcagggctgcattccctctggagtctctaaggaaggatccattccttgcctcttgcagctcctgggagttgcgggcattccatggcttgcagccgcatcactgcaatctgttttcatgctcacctgaccttctcttctgtctatgtcaaacttctccatcttcctcttgtaagtacacttacgattgcatttggggcctacctagataatccagtgtgattttctcatctcacatttcttaacctaatcacctcagcagagaccctttttccacttgaagtgacaatcatggattccagggattgtgacttggtatctttgtgagctatgagtcagcctcctataccatctgaacctctctgtcctgtgaaatggcagaaaacatcctcataccacagggctttataagaggtcaataaaagcgtcaaatagaagggccttcagcacagtagctgtctacttcgcccagctgacatgtcatcagggccacatggggtttgtgtgttcctgggtcagtccgtgttgagcccctttctgtgctgaggcccaacctgggtgctgggctccctgtggggaaccagacctctgtcgaggcagagcctccctgcaatcctgtagatcaggccgttgtccaaggacaggctttcagtcttcaccggatgacagtgctctgagtgtagcatttctactgcatgaaaaattaaaaaaaaaaaaaaaaaaaagaaagaaatgggaatgattactctgtcttcctagagctctgttttctgtgctgaagaaactctggtgccagcttcatcctccttcagtagagtctcttaggacaaaggcccattggggagccctgtgaatagttggcagcagtcccatctcgcaggcctcctagcgcagggtgctgctgctgcgatgaatcagtctctgcagggcacagtttggcttcacgttagatccagatgcagttacggtaactccatggcgtcaatcagaactgccagctgctcttgttagatgccccggcttatagcaacgacaatgacaatgaaaggacgaccaagtcagcagtctcctctccttccctctcttccagcttctctgcttcccacgttttctcgctaaaaatatgaaacttttattgttgagagtttaattgtatccttcccccagttattatttttgttttattctcttagaaaatttttaagtgtacagtattgtttcccgtgcatgttgttgtatagcagatccctagagcgttttcatctttgatgactgcaactctgttcccattgaacagccaagtccccctttcccctgttcccccttcctccagcccctggcaactaccattctactttctgcttctatgactttgacgactcccagttacaatctttgataccatcttaggtgcttaatatgaaatagatggatgaggccgggtgcagtggctcatgcctccgcatgacctcagcactttggaaggccgaggcaggtggatcacttgaggtcaggagtttgagaccagcctggtcaacatggtgaaaccctgtctctactaaaaatacaaaaaattagccgggcgtggtggtgggcacctgtaatcccagctactgaagaggctgaggcaggagaatcacttgaacccaggaggcagaggttgcagtgagctgagatcacgtcattgcactccagcctcggtgacagagtgagactccatctcaaaaaaaaaaaaaaagtcagtgatatcatcttgtgagtgaatgtttgtgaaacctgtgggagcccatgtctattttgtattgcctgtgaacatcctctcgctgggatggatttctctctctccctctctttgtcattgttatgtaccttgagtgtgtgcttccctgcgttaatgcctttgtctgaactctggggaactcttctatggcctggaaaactcctcctgcatcctgaaacttttccatgactagcttcattctctctcattgagatagaaccagtcatatctgccccccgctttcttttctgtttgtttgtttgtttatttttagaattggggtctcactgtgttgcccaggctggagtgcagtggtgtgatcatagctcactgcagcctcgagctcctgggtcaagtgatcctcctacctcagactcctgagtggctaggactacaggtgcatgccaccacacttggctaattttcttttttaatttttgtagagatggggtcttgctgtgttacccaggctggttttaaactcctggcctcaagtgatccccccgttttggcctcccaaagcactggaattacaggtgtgagtcagcgtgcctgccccccagctctcttgaagatcttctctagctactgccctgtgctgtgggaggagggctcagtgggtggctctgaggctcccccagccacctgtggagcatctgtaaccactgctgctttatactttccttcctgtgaaatctacactgtccattgatgcctggcctcagcaccctggttgccatcaactgtggtctcagtagggattgtggcccatgaactgcagtccttcgtgcactcaccattctctgtcattccaacttgtactctgatagcttgtcagatggcctggatttggttgcctatcaggtagcctcatctttgaccttggcctttggaagcacagtgtctccaagacctgcagagtctgcgagttagttctcagtgcaccctgtctccactcctccctggcctttcatgcctgttgaaccagctctttgactcttggatggactctttccctgctaagtctcttgccacttgtactgttcttcagccctgcctttagactgacttcctccctctactcagctcctacctggtccatgctcaatgactacagagatgctgtccttaccattctaaaggtccttgtttccttatccatcagctatactcatttctttactttttaataataaaacaaacaagccaatgcccatcctataccatcatctactttctccactcttggctccaggattgttagagaattgtcaaatgacaagctgagctgatgctttccaactttccaactttagttgaaaccttattattgctcacagtcccctgcattcttttgagttctccatttgtttttatatgccaccttcctccaacaagtttgaagaagcttatttggaacataagcacaaaactgttcaaaagaggtctagaagaggagcaagagtctaacctggtaaccactgattgatcaacagatttatccacatgcatattggcagccaaggcaaaaaggaaaaccacatcaattgcacaattctaattatttgaaaaaaatgaagcaagcaattttgagacacttatttctggaagtaaaggttaagaaggatttatcccatagctctcgataggggatattgaaaaacataagggacaacacatttggctttttgttagatggaaaatgcggaagcttcctcatgatcatttcttacattgagctgcattaaagctggtagctgggagtataatatcaagatgtagtcaaataaagacattggttggaaaattaagaaagcaaattagatctaggtgtgcatatgtatatatgtgtgtgtgtgtgtattttatgttttatattgatttcatttgcacctacctaaaagtcaaaacatctaaacaatgaatagataaaaatctccttttttcaaataacagttgtcttagttctccttttgtcggcaccatgtcaagactcaccttaaatgccatttctattattggcgctttttgagcagctgcattttctctcttccctgaactcacatggtgtgtgcctccctcttgtgtagttagttcctatactgcctatcttggttcatatttacttgggttcatattttgtctgccccaggggacaatgaagtccccgaggcagggtccatgtattatagagtgtcctatctcccacggtactcacccaagtgttttacatgtagtaggatctcaataagtatatgtggacgaattgcctgaattagccatggtgccagcagtgtacactgtatgacttgatggtgtcctgagtgttagagatctgagcattccactttaaatagcttggactagttcagagttgagaaatatttcaggagaaaaatacctctgttaagtttcacattttgcttctccctgttgcaggtgcacagttgtggagaagcctcagtgaaaggtagggaactttctttccgtgttgtgcttaatggagggagggtgagggaggggactgagccaccaagatgtagctctgaaatagaattttagtgacaggaatctaaatccaagagtaatttaccagagtgggaaaatgaagaaaaataccatcaatcggaggccaaggatgaagttgggactcattctaggaagtgctgtgtatcttgctatgatactgggcaacatgaatttgtgagaatcatgtgtgaggatttggaagggaggggagggaggcattttcttttgggatttcctttcagactcatttttgggatgtgaacaaaactgctgtattgggagaacagggctgcatgcactcagttggagaaggctgctggaatgttcccgagggttagccatgctgtcagttcagaggactgtggggtgggggagacacagagatagggtgagaggctgtgaggtgtgagggtgcaggagatgctgactgccagtgggctccttgcccagccagaggcaaacctcagctctctttttatggaaggtccatcattcatccattctatggtaaaggggctgtttccaaatggacaaggaaagggctggggcagttgattgaggggaccacagtgcactctaccaactgggtgtatgagaggcgggaaaatgaggggagtatggggattaatattgcagtaagatgaatttttgtaggaattgattttttaaatttctgccttaaaatatatttgtattacttaaaaacgatggctgaggaacctgacttgtatctaagtgggcatcacaaaatgaattgtacaaaaggaggacaaaataatgccatgaaaaatcttataaaaaatcaccctgtattttatgtaacgcacctttggaagctgtgcttatgcaaataaggcttatttcagctggaaaggttaatttcatgatctgtttacaactgcttgcttgttccttcatttcaaatcccagattttcatgggcaggatgcagacttgccaagagactcaggagagagggtgacattggatataagaagagaaacgtgatccctggtgcttctcgtggaggtggcgggcagcctgggaggggtgggctggccccagggaagagctggcataggctctggtaggcatttgtcttgccctgtgctctgatctgtgtgctgcgcataggcaggttaaggttctctttctattttatagaaacttgcttgtgggaatgtcaagataaagagaaccttaaattactcttttgagatagggaaacagtcatgtgtttggaatggattaaaatgtgttttgggttttgctgtctatctgcttcatgctccaagtgctttttctacattgtcatcttttagggaaatcatttaaataaaaaactgtaagagaacgtctcagctggaaataggatctgatttatgcagtataatgttggaaatcagtaaaagacatctatgaagacaaggaatttcatacatagtttgttcagtatgagtttttagaattattttaaattgcaattatgcacaggcaataattttctttactgatagagttttatcagtagtaaagaggaggataaagaagagaatgaaaagcaaactgagaatttaaaatctgattcctaagcagaaaatacatttctgacccagcagttgtataaatacagttgtataaatagagcagacaagaaatactgcttaagttttagatttcttttaaaaaggaataacaaaaaagtttgtattcatataataaaataatttgtgtaattggaaacagaaatttaagatatattgtcaatggatatgatgacataatttctacaatcatgacaaaatatgtacagtgactcacttaagaaagtttcctcttttcttttccagtatcttaattaacccaacaagtaaggtttgaaatacatggaaaaaaaagatttatatttttaggcctaattgatagaaataaagattaattttcaaaaaacttttcaataaaaacaatttctatctagtaatataaatacattttacccacacaggtcatcttctaagaccaaatcttcctaaattaattggttaatttaggaattaataatatgataaaggataggaactgggatagggtgagcatggctctcatttttgtttgccagctccatgtttgttaaagacatttacaggccaggcacggtggcttacatttgtaatcccagaaatttgggaggccaaggtgggcagattgcttgagcccaggagtttgagaccagcctgggcaatggtagggagaccctaactctacaaaaaaatacaaaaattagctgggcatggtggcgcatgcatgtaaattgagctacttgggaggctgaggtgggagaatctcttgaacccaggaggcagaggttgcagtgagcggagatcacgccactgcactccagcctgggcaacagagcgagaccttgtcttaaaaaataacataaaataaattaaagacatttactttgttcctacagaaatgtgtaggctctgaggagtgattcctgctaactaaagctctaagacaaagatttgtaagtatgagtgagagggatcttgctctgctaaggaattaaactgttcagtgggtttgaatcttgcattagttggttctctcacacaggcgttatttttaaaaacagttttagatttacagaaaattgagaagacagtacagactttccatacactccccacctcctggaaacagtcccccccatccccccattaatagcatcctacattggtgtggtacaatcaatgaagcaatagctaatttattcttattaactaaagtccatgctttattccgatttccttagttcttacctaatgtcacttttgtgtttcaggatcccatctaggatcccacattgcatttatttgtcatgtccctttaagctcctcttagctgttccagtttttgagatttcctttgttttggttgatatgggcagttttgaggtgtactagtcattgatgcctcctcttgaaatttgtctgatgtttttctcatgattagattgggggtatgtgtttttgggagaaaaatttcagaggtaaaatgtcattttcatcatcctatcaagggtacaagccatcgacatgtgttatgactgaagtagtgtttgtcaggtatctctaagttggttctcttaagcaggagagtctattggggaaactgacttaagatctgaaggctgttgatgagaacagccagggatttggatgtttgctgaagatggcacccttaaggcacacaggccctaggcatgtatccacctcagggctggcagtttggagcctgtgtcctagtcctgcccaccacagatatcctgggctgccttgggtaagtgtcttaagctttctttctttctttttcttttttttgagacagagtttcactcttgttgcccaggctggagtgcaatggcgcgatctcagctcactgcaacctccgcctcctgggttcaagccattctcctgcctcagcctcccgagtagctgggattataagcatgtgccaccacgcctggctaattttgtatttttactagagatggggtttctccatgttggttaggctgatctcgaactcccgacctcaggtgatctgcctgcctttggcatcccaaagtgctgggattacaggcatgagccactgtgcccggcagtgtcttaagctttgtatgcctgggttacctcatttgtcaggcaaggaaatcgaggctttctctctaactgtggttggggaaagattagacaagctgagctagggtaatttcagtggatttgaaaaagcactccatgctctttgactcagggttctttcagatttactgagactcagtttgactggtcaaggtattttctccccttctttcttgcacccacaacccttctgaatgcatctaaaatttgcatgtgagaatttctgctgtgctgtctcttaatacagaagctgtttgagtgtttaatgatgatttggaaaaaatattagcacagcagaaccgaaggacatactttgctaactgttaggtttggttacggagtgagaagctccctattctagggcttttgttagacttaggctatttctctcctttggggaagtgctcacatgtcccagagaaggcaggctactggaaataccatttatttgtatttgtattttattttattttatttattttattattattattttttgagacggagtcttgctctgtcgcccaggctggagtgtggtagagcgatcttggctctctgcaagctccacctcccaggttcatgccattctcctgcctcagcctcccgagtagctgggactacaggtgcccaccaccatgcccagctaattttttgtatttttagtagagacggggtttcaccatgttagccaggatggtcttgatctcctgacctcatgatccgcccgactcggcctcccaaagtgctgggattacaggtgtgagccactgcgcccggcgggaagtaccgtttataggaagggtcttattcattctagaactggttaggtgtatatccaggtacagctaactttcattctggtcccaaccctgcagctcgtggtcctgccaacttcacttctctttcggcctcaggttttcatctggttaatgggaggtacaagtgaactgttgcaagtaccccatacagcctgagaagtgtatgatggtgcaatgtgagggatttatgtgtccctttcatattgttgtctttttacaccaaagggatactttcctcggtgtggccactgcagtttccaatgtgtaatgctatttaccacattggagatgtgaagttacatacttattccttgaatttctttgatgattcgatatgttgtctgcagtgattcttagcatctggcactagatagtgcttatatttttaacactgaaaaattaaagaacactttatttcaagaacaaaatacagtgactgataagtagatctttgaaggcagacagaggtgctcttttgctcatgtgagccatgtgggattagggttttttcacctccacattcacaggtgctgagctcagaaacctccccctcacatggcaggagctagaaatcacctccaactgccctttggctacacaactgagattctcaggttagtcagaaaggcttaatttttcctccttcttcattgggctagatctcaggataagccaagcctttttttccatggcgtttcatgacctttaagaagcattcctagcattaatttcactgtttaaaaaaagtggatcaaatagtgggccattcaccactcacagtgccattgttaagcttttacattgagaaggaacttctcctttccttccctacaatcctaatggctcgttatgtagatcacaaactatcatttactctttgggaaaaattgcttttgtcaactacactaagcttaaagtatttccttcaaaatttagcataaacgtggtagtagatatgtacacttatgcaggtgtggtttttctggatgtttaaagagtattcataaagttcacaaatgtcacactgaatgtaatggtaaacccagggtctaatttctgatggcctcatcaacaatcaacattagataattttagtcatatgccattcacatgtcaatatttgtacctggaaaattcctttgtgaaaatgtggttctcagtgggtatgttctgagaaggacccatgcttgacctatttctttaataaacactaactctacaatctgtgaacaggatttacatagagctgtctgccaacagaaccaaattgacatctttatggttcattcctagcactgaattgaaacctgatccatagtattataatagtttttcctttctgcatgaaactgtagcatttgattgaataaagtcctcttaacgaatgagaaagtatgcatgtgaccttttctgtatgcacagcatcatttaaaaacataaaactgttttcagtttggccaggtttttccaagtatgttataaattagaaagaaataactttacatacaacaaatcattcaaaatttcttcaatagttggtacattataactcagatgaacaagttattctcatcatgaatcttgttttattgtttggtgccaatttaaagcaattttttccttggcatctaaagcttgaaacctgaaaattatggctgagagctatcggattttctgatagatattccaggaatccagatgcccctagcggtgtgctctctgcaggaagtggatggggcttcccgagcttgcagctaggccattgcatctgatggccttaccttgagctgattcttgagaggcagagcacagattcaacagagtcagtctttccagagccagcagggattagcaaagggggtcctgaggttttttttgcccctagcttggtcagattgtgggcgtcctcagcctgtctatctctcaaactcttaggagaagcagttgtgtggccctgattcttgcaatgaaatgctcttttgttttgtgggcttccagaaaatggccagtgaaaatgctctagttggttgtatgctttcaagtaggcggaggggttggaggtgggaaggtgaaaggattcaagaatctttggttgtaaaacccaagtccttggtgttcacccagcttataggcccagaacaaattggagcatttaaatcagagatgtctaacacattaaatccttgagcacaacattatgtcactcttaaaagtagaaagtcatctagcgtttgctaaattgtctcctctaaggaatggaacttagtgagaaaaatgtattttttatatttatgactcatatctttatctcaaacttgcctggattagccacagattggctgatctgaattcccaaataaaaagcattaaatgtttacctgatagcttaagaggtttaatcacgctccatgttaagtgtaacagtaattctgacattcatgtgttgtaactactagacttcacagtttgaatttgttctaatgtgtcttaaagtcaccttgtaacttgcactttataatcttgtacctggaccttgtaacttgtacagtaagactggaaccttgttaataaggcatcatatttgaaagctgtattttttagttttctgttcagtcacaactatagacagagagccacatcttcatgagtttaaaagaaaatcttgctgtgaaggatacattgttgttttagtctgttttgtgttgctgtaacagattatctgagactgggcaatatataaaggaaagaaattcattgcttatagttctgaaggctgagaagtccaaggtcaaggggcctgcatctttgagggccttcttgatatgtcatcccatggtgaagatggaagggcaggagaacccgagagagcaagaaagggccaaactcgctttgttgttgtttgttttattttttttaagagacagagtctcgctctgtcactcaggctggagtgcagtggtgcaatcgtagttcactgcagcctcaaactcctgggctcaggcagttttcctgcctcagttccctgagaagatgagactacagtcatgcaccatcacactcagctccaactcacttttatttttttcattaattttttttcttatttctttttaaaatttttgttttttctttctttttttaaattttgttttttctcaaactcacttttataacaagcccactgtcatggtaactaacccactcctgctataaaaacaatccattcatgaaggcagacccctcatgtcttaatcacatcttaatatcatcatgatggcaattaaatttcaacatgagttttgcaggggactttcaaaccatagcaattagattaaattaaaaaagcatccctcaaaagaatcacttaaattcagaatatgctggacatacgcgttataagtaagcctatctgtgcttgggtaaatctttggctgaagaggcctaggcgagcctgggaactaagcaccagttttaaagtctgtaccctgccaaaatcaaaacccaaatgggccttttattccctttttcaaaaataataattgagcacaattctgcagtcatatattgcacaatagagagtcaaagcccttttctttctctctccgaagaaagaacagatccattcattgactgacagcaagctcttagccagagctgctcagatttggtctgaaagtttctccaagttctacatgcagtttccaatctgtggttaattttttaaatttgtgctttgaaaattagatccactgaagacaaatatgaaacaagagactagaagtaggttttaaagctgttttggaataaaaggatgtggagaactgtagttattatttcttaccatcagtggtgtacctacataaaaaattatgagttttaaaaaaaagtctcatgctgaacaattaagggccactcttttctctcaagagtccatctaactcaagtaagtacgtgcctagaatgtaagttcaagggaagagccttctaggaaattgacgtggatcttcaggacagcaacggatatatttcttgagacactaaaatgatggccgggtgcagtggctcatgactttaatgccagcactatgggaggccgaggcgggcagatcacctgagatcaggagttcaagaccagcctaggcaacatggtgaaaccctgtctctactaaaaacacaaaaattagccaggcatggtggcgggcgcctgtattcccagctacttgggaggctgaggcaggagaatcagttgaacccaggaggtggaggttgcagtgagccaagatggtgccactgtactccagcctgggtgacagagcgaagctccatctcaaaaaaaataaaatgaaacaagaggtgcgtatcgtatcctagttgctctgttgatgagggtgatacgtttttcagacccgtacctgattgcatattcctttcacaggcaacatgttctccttaaattcagatttgtcaagtcaaaacaggaaactaggggatccaggattttaggtgggtctggcagcagtggacattaggtaacttatcaatgatgtaatactcagaactccctaagcaaaagatattcaatgttatattttcttataatttataatttttgttgttcaggatcgtttttgacattcctttaagttaatgtaattttatgacaatctgattgaacatgagttcagtcacccatttttcattattttggggctacttcatcctcgctcggtagctcacgcctgtaattccagcactttgggaggctgaggcgggaggatcacgaggtcaggagatcgagaccatcctggctaacacagtgaaaccccgtctctactaaaaatacacacaaaaaaattagccgggcgtggcggcgggtgcctgtagtcccagctccggaggctgaggcaggagaatggcgtgaacctgggaggcggagcttgtggtgagccaagatcacgccactgcactcaagcctgggcgacagagcgagactctgtctccaaaaaaaaaaagaaaaaaaaaaggtgtttcctgtggcagtgccttgggcctacacagctgcttgataacaaatgaaaggtaaaactctgatggttttatcagtgttttcagattctcataaccccaggtttattaggtttgattagttagcagatcctgagttattatggatttgaaatgcgtgaagttcatttataaatatggaaaataactcggctagaataattgttacctaatagcatgcttgcgtcaataaatttaaattataaaagaaaaaatgattagtagttaacatttctcttaactcatcctatgctgtgttgcagttatatgaatacaaattaagattttgcaggtggttagaaatctatttctcttattatttatttatctatagtccccaaacattgttacttgtagtcatatttgcctagtagcatttataaaataactttaatttttccccaattgtaaaggtaatacagtgctaatttaggaaatcaaaaataaaggaaactacacagaagaatacccaaatcacttagagactcatcacctagaaattaaactcactttccaatttttagtttattttgttgcagtctttttgtagaatgacatatgtgtttgttcattcgtccatcctttcaacagaaatttattgagtacctttattgtcagaccatcttctcagcatttgtgaaagggaaaaaatgtaaaaacaggccaagtgtggtggctcacgcttgtatccccagcactttgggaggctgagacaagcagattgcctgagctcaggaatttgagaccagcctggccaacatggtgaaaccccgtctctactaaaatacagaaatgtagccgagtgtgttggttcacgcctgtagtcccaggtacttgggaggctgaggcaggagaattgcttgagcctgggagatggaggttgcagtgagcccagattgcgccactgcaccccagcctgggtcacagagtgagactctgtctcaaaaataaaaataaattaataaatagacaaccctgtccttgtagagtttatattctagttagtgagtcagaaaataattactgcaatatgatgttagatggtgaaatgggttgagtggcaactaaagcagaagagggagtagggagtggtgaggggccagggagagtccagtttgtaatgtggcactcaggaaagatgttactggagatttttgaacaagaacttgaaggtgagtttgcagattgcgtctgtatgaagagcttttaggcggcaggaacagggagtgcaaaggccccaaggcccgggcttgtgtgagggtgaccattgtgttataccagtaagttttgttttattttgttattcatggtatgtagccatagtgactgggatcagtggaatattatgtagccaataaagatcatgttgtagaagaatatatagggacacgaaagatcatcctttattgttaattttgtatcaaaaattgtagatttaaagtaagcgcagtgaggtatatgcgcagtacatcataattgtatgttggtacataaatgtagttatctcagggtgaggggaatataagtgttttttattttcttgattttgttcacccttattacattatttttcctataatgaacattcttttatcaagaggggaaacaaaagacattcaatgaaaaagagggtgtgcccgcaggcagggtgaatgtggggaggtgacaaccagcactctgcaggcagcagcacctggcatttagttcacctgagtgcccagggctccggctcccaagctgctgtggagaggcaggcgctggttacaggagagagactggcacggcccagtcataggaatccaaggtcagggacaaagtccagagaaacaagcgaggctcaacggagaggttccagcctcggaaatgtcagcatcattccaggtggggggcccagccaggccgagtgtcttttgacacaaagtctcacaggattggggtgaagaaaaatgatttatttccaaggtcaggtgagatcaaagttcttaaattcttgctttttgaggctcagaggcaagctcaaaggttcagcctccaggtacaagtgacagggttgaatgcatattctggtgacttaggtgtaaacccaaaaatgtttcaagatttggaaactctttgcattatccagaataagatttaaatcttatcctcatggtccgaactgtagtctttggacaacaagagggaatctgagagaatatcgtgctctctttcaacaacctatccctgggttctgtcagtgggcaggtctgtctgtctgtcggcctacctgtatatgttccttaggtacatgttagtgatcatattgaatatactgaatgatatttgtaatatatatataagttgtaaaacataataaaatgaatatacatgaacctattatccaatcaggactgatacagttgctcccccgcccaccccgtcctgctgcctgccagaagcaagcatggtcctgaagtttgtgctcctcattcatttgcttttcaaaaaaaagccgcgcttatatttaaatgaaatatgaatattcatacatttaaacaaaatctaaatatatttaaacaaaatctaatctaaatatttatatatttaaacaaggtataaatgtttatatattcaaagtatagatatatatttaaacaaaatataaacatgtatatatttaaaccaagtatgaatatttatatatttaaatcacatatatgtatccctaaataaagtttttgtttttgaggtgtatcaaaatggtaccatatttatgtgctcttctaggactagtgtttttttttcttacacgttttttaaaaagatcagttgtgttgctgtgtatagctgtagttcattcatattttgtggctgtacgatattccatcatgtggactatatcacaacttatttatctgctctttttgcactgactttggatttttttttccatagtgtgcactgtttctgtttctgagtttacgatatggcagtacaaatggtcatttaaaggaaaaaggtagatgcctaatgcttaaagtgaacagttcccaaagccagaatattgtatatttgaaaggttgtgtaaaatttataccaatacaagggctgtgacacctagcatggaaatattcttgtgagttcttgggaggtttttttgtctttagtctgtgcatgctcagccctgttctagggctggctgccactagagggggtgtgagcgatgggacatctgtttcagagaagctaagaatagtttggctactgcagaacccagccgtgtggctccaaagtgtgattagtacctacacattccagcagggcaaaagcattaacgttgttctagttacaagaagaaagtccgatgaaaggtgacttctatacctgtacctgtgtgcacaggtgtgcatggatactcatatgttttagagtagtagggggagtgaaaaaaattaacagggactaactaagagaagtgattgaaggatagatcaatggagaatatgacagagaaagtgggggtgggcaggaaattcacaaatgaatgacatgaatcaatgacaaatggttgtgttttttagttgacaaacaagctaagcatctgtgaggtctctaagaactaaatggtactttgagttcatgacccttttactgtttgtttctatccactgtcttatataaaatcttttgaatgttgtttatcttgtgctctccaaagtctttccttccctccttgctctttgacttagtcttttgacttagtattttccttttcttgaggactccagatcatcttgaattgtgaatcctagaaaataacttaatttgcaagtgattgtgtggaaagagggggtattagtgagttgttggctcccaggcataaattaacctgttaaatactgagggcaaaggttcctgcttgttagaagagtgtacaagagcagtagctgctaaagaacgtcttccacaccattgtgtgtttggggcaggctgaatagtcccatccacaccaaagaagtccataccgtaactcagaacctgtgaatacatgacctcagatggcaggagggactttgcagatgggatcaaggatcttgagatgggtggatgatcctggagtatccaggtggccccatgtcatcacaaaggttcttttaggaaggaggcaggtcaaagagagacaatgcgaggctgcaggctgtgactatggagctagggaccatgagtgaaggaaaacaggtggcctctagaagctggaagaagccaggagacaccatctccccgagagcctctgaaaggaatgcatcccagctgacccagattagagtctggccaccagaactgcaagatgatggatttttgtggtgttcagacactaaatttgtaatttgttacagcaggaataggaaactaatctagtatttcttatgatgtgaaagaaccagctttgatttggaaatgtagagggcagtttttccaactcatgtctccatctatgaaagaatgaagtttgaccctgatttgtgggagagcttatcctgaaacaaggagggctagagtgacatggggtggtaacatttttgggagggagccaagaatgggcctgggagaatgtccttactgggcaagtagaaataagaaggtttgatgaaaaatgaaccaacatggccaaggtagtcaagaagagtcatgaagatgccatgcttggaagccagggaaaaagagtgttttaaggagtcagcattaactgggttctaagagcaccagggaaagtcactggattgtataaaaatgtttttggaggcctttatcaacagttctccatgtttttttgtttatatgtgtggaggaggaggggaaggagctttttaggagtgaaaaaccaaattcaagggcctgaggatgagatgagggctgagaaaatggaggtaggtagtgtgaatcacagtttggaaaatattgctggtaaatgaatggagaaaaatgaaacagtgaccgggaaaagagtagcatggcttttgttgttatttttaaaaattgtgataaaatgcatataacataaaatttaccctgagtgacattttgtacatttacaaggtggtgcaaccatcaccactgtctagttccagaacatttccatcaccccaaaaggaattctgtaaccattaagcagtcaattcccgtatcctcctccctgcggctcctgacaaccactgcttccccctctatggatttgccctattctggatatttcatataaatggaatcatgcaacatatgaattagcataatatcttcaaggttgattcatgttacagctcttatcagcactacattcctttccatggctgaatactattccatcatttggatagaccacattttgctttgtcatcagttgacggacattcaggttgttcccgtcttttgattattctgagtagggagcagctcggttttattttgtttggttttgttttcaaaatagtgagagctgactctgtaggtgaaggggaagaagcatgcagcagggctggatggcttttgtccaccaggcagtgttttctgcatgcagcctggcagcttgcagtagagtctgatctgccacaagggggcagagttatgtctgggggacaggtggactggcagatgatgggcgtggctcatcatccataaatattggaaaattgacgatagcattaagtaactgcagatgctgtaatggcagctggggaagttgaattctaggcaccatcagtacctccagcagtgagagcattgcttctaagggaggaacccaagaatgtgcccttaatttgacatttaaatcatatttcctttaacgcttttttttttttaaattttaaagaggagggactatgcagaaggaaggaagtcgacattattatttagaggtatttggcaaaaagaggaaaagatacatggtgtagtatcctcactggggtgtcatggtgtagtatcctcactggggtgtattgcattattactcacgtgctgtttattagttctgttgaaggttattcttacttgtgcctgtttttaatacctgaacaactgggagagaggacttataatcctgcagtcatttggcttgtattcttggagagtatttttaaactataacattcagagccatctcatgtcactttaacgcccgagcagtactttcactatttacttctcctggactacagacctcagattttgcatcatattttcacgaacacagaaaatacatgttctagattgtttttgatgttttccttattttggggggccagttattacaatctttattaaaatgagtgatattttcaatcatgactcaggagtcatctgctgtggcacgaaaactgaattccatagcttattaagctgaacatcctcaagtcagaactgctgtttatgttgaataaattgcacatttaaatacttttgttcccctggggctaagtttggatgaaataatcttgcttccaagggattttaatggatgtatcatgcttggaatatataatgaagactcagtaattgagagaatgtctaaatggaacagaaactttatttttaaattgagaaataggcctgaaactgatctagggggtcaaagtaggactatcccaagtttttattaaacaggaatagaaaagcccacctttctccacagttttacttatattaatatatgagcggttcaataaatacataggtgattgagatggaccatttctacttccctagtggaaatagggggggaagtgatcccagtttgaggagtttgtttgtgctctctgtgtagagcacttagaaagttagctacacattgcttataaattcgtcttgttctttgatgaaggcatgacagtcctccaacagtgaaggaatacacagcttgtaataaatgaatttcctcaagctggttagaatatgggatcgataattttatcagtatcagaaaggtagctaaattcaagagaaagcttttcctctaaatactgccaactgatttctggaatagaaaaaaagctcttctctggcaagcaagtgattttgagaaatagggtgaggccagtgagaagatgatgaggctgcttggacagggctttcagctctgctactgtgtcagtgacactgctggtactcaccacctagattttgcatggcctcttggcctgggattctcttgattttagtctgctcaggcagccgtaacagaataccatagattgggtggcttaaataacagatatttatttctcacagttctgctaagcagtcctgctcacgctcccctcaccaccctggtgtctgattgattatggctcctcatttatgttatagaaggagagaatccagacaaaatagtaaggtgtatctgtttaaaatattttcagtcaagaaggttataacagtattctcaagatcctttacatttttcttaatcagctgttcatgggaaaccaaacagaaaccacattaataatgaatacattatgactccctcatttgttgtacttttctttttattgtgtaaggactgagtatggccaggtatggctaggttacagtaaacaagcataaaatctcggtgtcatacaatgcacatttatttcttgcttatgtttctgtggatcaactggggttcagctggtttaggctggacttggctttaagatttgggttgcatccaagcttactccacagtctttcagcctcattggaccagaggctacttaaagtgtgttattctcatggacaaaggcaggaggggcataagagcacaaacccagtaactcaggtacatttcacgcctccacctgctgataaccaggaggcctaagcaagtcacatggccaagtccaaagccaagaagggaaaaatacctttggccacacaaggccatggtgagagtatggacgtataacactactataagagagtaaagaaatgagtcttataatttaatctgatatgaatttttttacattattaggtaggaattctttatttcatagagttgtgtgtttttattttgtatttagtgtctttcaaagctcttgagaatagtttttgatgtgtagatatatatatatttatgtacttataggatataagcttataagtccaatctccccatttatttttaaagatggctactttaaatacgttcttctaaccctcagtgttttgttggtgttgcttgaattttttttaccataattattaattttatccagcattaatttcaaagaatgtactcaatacctgattatttctccctctttcaaaaccagaacagttttacccactaataacatcagattataaaattgttggcagatttgacgttaaaatgttatatgtgtgcgtgttcacatattcagagctaaaggggtttgtaaaacctgccgttacatgactgaacacatcatgtacctttatatttatagaagggcctcattgtacacattgaaaggggaacttggaagaatcagatatattctttggcaaagtctcacgcctgtttctgcagcctaaatcaatgctactgaaacataagttatttatttttgggccataaattaaattcccattgttgctaatactcatggttttcaacaaaagttaagagcgccaacagttccaggctctgcgggaagatggttgaaagggaatgtggaatgtaccaaaggttttatttttatttggaagaaaccaaatacccctgttttctgttcaggagttcattagtcatctatgttttcctcggataaaatagctcttatcttgggcctgactctgaaattcttcccttgaatttcttgtgatatttgtaatggtatgaaacactttggttgtgagtagagaaaggaggtgacactttccacagtcaccctgtcggtctctgacaaagctgctgttttagattcctgcttaaactttggggccaccttccctgtgggtgtcttgagctgtagacttccattgtttattaaatacctgctctgcagaaggcagaccctgccggacctatagaacggtccctcgcattgtgtcaagattttgttgtatttccgttgatgtcagaacatggggaaaaggtctctgatatcagagaggtggtagaaataacaagagagttgtccatggttgggctttgaagctgtggaattcacctttgaagtaactctaaagagattctgttgctatttgctctacataaagagagagtctgtgccaccagaataaaaatagctgtaagtattacatcatcatcagaagttttcattggttcatcaggccatgaagggaacaagtccatggtgatatttagatagatttctgttttgctcattgaaatgatgattttaagacaaagcaggaaaaaaggtaggagggggagggatgactgaagaaggccaccacatttattttgtacacactgattaatatttcaaaattggaatctggcaccaatttttatttgtatttaatcagcaccctattttattcctgttttctaaccacctgttataagcatgtgtctcctatttctactatcacagcatctttggggcaacatgttgcttctaatgacttactcttttctaaagtcagacatttatctcaataatataaaattttggcccagtgcattggctcgtgcctgtaatcccagcactttgggaggccaaggcaggaggatggcttgaggccaggagtcccagaccagcctgggcaacatagcaaggccaagttgctacaaaaaacgaaaaattagctgggcatggtggtacaccgcctgtggttccagctgcttgggaggctggggtgggaggatcactcaagcccaggaatttgaggctgcagtgagctgtgtttatgtcagtgtactccagcctaggcaacagagacagaccctgtgtaagaaaaaaaaaagatataaaatttcaagatttgtgcagtggaaaaacagatagaccaaaggaaattgttttctttttcatgtttgtttctttcttgggatttcaatcattgtatctcacctctttgctttatatgactggtgcaggcataaaatcgggattctctcatggaaagggaaagggtttagctcacatctgcacggcatgctgcctcttgtaacccagcactgcctcccatccagcatgccttctccttccctagctacctagagtgactgtgctcagtgccctggaggagaagcatcctggacacatggaacggtggctctgaagagctaatttacccttctttctgaggaagcttctgtgctgacaacagacagaaatgccctcggtctagcatcaacaaaggaggaattattatttggacttggggcatcttatggaagctgagagaaagaaatgctaggaacaggaaccaagacgttcccaggaacagaagcaacttaaagcctcctaggaatcaaaggaagctgacagggagcttggagtcaagtgaggggcacccagggaaggggaggatagtggatgctgctgctgctgctgctgctaaactgtgaattaactgtcctctcttagtgcttagtatttgccaggcactgtgctgaatgctttctgcgtattacctaatttatcctcaagacaattccatgaggcaggaattagcagccccctttcaaagacaaggacaccaaagcttccttaagggacttggccagactgatgggtttcactcctgcctctctccccctctaacaccaatgggcttcacctcagcattctaccatatcccatatcaaacagtgcatatctttccccagctcatagcttcttaaacagtatttaggaaaataaaggtatggttaggaatttcaaacaagaattttaaaatgttttcatcacattgcaagaatgaggaagcaagcagaatttgaggattggagctggaagagcttgtaggggaacccgagctggaagtagccctgattcacaggactctccacatactggagaggtgagctgtgcttttgcaattgaaatgtgttgctttgctgttattcaaagcttatttttaattgatttgaagcctgctttcctctcaaaataaggctgtatttttagtaaaatgtattttcatatgttgtcacataagctaattgttttcttggcatacattttgttcctatttgtaaaagagtaaaaccttaggagataatgtggccccagtggaagaaactttggagtctgaacaaagcagttcagcattctaggcctcattttgcttattggctaaaacacagtgagtaggcttattataaagctgtggtcatcaagacagtgcagtaaatagatcagtggaacaaagcagagagtccagaaatagacacacgcatgcatgacaactaatttccaacgaaggttcaaaggcagctcattggtaaaaggatggatcacctttccaactaatagttctaggaaaatttaatacccgtatgcaaaaatatgaactttgatccatcccttgtaccacaaacagaaattaactcaaaagggaacatgggcctaaatgtaaacctaaatccataaactcctagaagaaaacacagctgaaagtcttcataaccccaggttagggaaagatttcttagatacaatattattgggatgatccacaaaagaaaaatttgatagattggacttgatcaagatgacaaacctttgatgtttaactgacatagctaagggaatgaaaagtcaaggcatagattgggagaaaatatttgtgaatcatatatctgataaaatacattttttccagaatgtataaagaactattaaaacttggcaataggctgggcatggtggctcatgcctgtgatcccggcactttgggaggctgaggcaggcggatcacctgaggtcaggagttggagaccagcctggccaacacggcaaaaccccgtctctactaaaagtacaaaaattagcttggtgtggtggtgggcgcctgtaatcccagctacttaggaggctgaggcagaagaattgctttaacccaggaggcggaggttgcagtgagccaagatggagccactgcatgccagcctgggtgacaagagtgagactccgtctccaaaaaaaaaaaaaaaaaaaaacttggcaataaacaaacccataaaaaatccaagagatttaaacagacacttcaacaaagaaaataaacacataaaaagatgctcaacatcattagtcagtaaagtggcgaattataaccacaatgagataccactatgccgatttgaatggatgaaatggaaaaaagactgaccataccaagtgttagtgaggatgtggagtgattggaactcttcttatatattgctggtgagaatgaatatcaaatagtataaccattttctcaaacagtttggcagttttttttttttttttgagatgttgtctctccctgtcgccccggctggagtgcaatggcgcgatctcggctcactgcaacctccgcctcctgggttcaagtgattctcctgcctcagtctcccaagtagctgggattacaggcgtgcaccaccatacccggctaatttttgtatttttactagagatagggtttcatcatgttggctagactggtttcgaactcctgaccttatgtgatcagtctgccttggcctcccaaagtgctgggattacaggcgtgagtcaccttgcctggcccagtttagcagtttttttaaaaagataaatatacaactaccatgtgattcaacaacttcctctcttagatatttagctaagagaaatgaaaacaggtccgcatgtaaatgttcacggcagctttatttgtaatagccgaaactatctgtcagcagaggtgagtgcataaataaattgtggtatatccatatggtggaatactgctcaacaataaaagtgagtgaattattgatacaaatcaaataacatgaaagaatctcaaggtaattatgctggataaaagaagccagataaaaaagagtacatcctgtatgattccatttgtatgaaattctaaaagtgcaaactaatctacagtgacaaagcagacccgttcttgtcttggaagggaaggaatggtgcagggaagcattaaaaggggtaccagaaaactatgggaggtgatggtggtattgattatgttgattttggtgctggattcatggctgtatagctctgtcaaaagttatcaaacgttaaaacttatgcgcagtttattgtaggtcagttatacatcaataaagcagatccagcgatgagcactaatacatgaatgaaagcaccgtagaggtagtggctgttctgttaagaagtcagtaggagtttcatggaactgtctgcagctaattccagagctagttctgacatcctttcacattgctgagacatcccctttgacttttgagagtaatgtattacatttatttatttaatttttctttgaagatgccttatagattcctagtacacagatggacaagtgtagacctggattatgagctgtgtttacttagggaatggctctgggctgcgttgtttgtatgtcataaaaacagagactgcagtaggtggttggttggaggaaaacaggttctattgactatcgttggttggaggaaaacaggttctattgactatcgtctattgacagtctatgactgtcttccgtttttcaaaagccctgtcacctgctactgttgtataccgatgagcaaatgacacacatacatgctgtaacctcccctcagctgagaagccttcaggcagaagtcaggtgaggtattgtttttgtttgtttttccttagaaaactctaccattaaagctcctgcctttacgaatccgtggtgacagagagagcagtggtggcctgtggccgcagaggggcctgagatgaggagggtgagtgggtgtatttacagtggctgttggaaatgttctgcatcttagttgtggtgattttaagagtgtaaacatctttcaaaactcaccaactttcctgctttaaatgtagacagtttattctttatcacatctaccaaaataaggttatttttcagactccatgcctttctgccctcagccttagaacatagtggcccctgaacacagctattaataaaataatcacattattgcctcctgtgtaatttctcttaggaaacaagactaaaacctcttgtttagttgtttcaaccatagatgtagagattagtttttatttttaaacctggatgttatttctttctatctgacctaccttccccttccttcctttccttccttccttccttccttccttccttccttccttccttccttccttccttccttccctccctccctctcttctcttctcttttcttctcttttcttttcttcttactttctgatggagtctcactttgttgcccaggctagagttcagtggcatgatcttggctcactgcaacctttgcctcctgggttcaagggattctcctgcctcagcctcctgagtagctggggttacaggtgcctgccaccatgcccagctaatttttgtatttttagtagagacagggtttcaccatattggccaggctggtctcgaactcctgaccttgagatccgccgcctctgcctctcaaagtgctgagattacaggcgtgagccaccgcacctatcttctatctgtatttctaagagcaaagtcaaatgtgaaatcgaggcagttcgttttagtgaattgtcttggtccatttgggctgcagtaacaaaataccttagactgggtaatttacaaacaatggaaatttattgctcactgttctggaggctgggaaatccaagatcaaggcactgacagtcagttgtgagttctgccctcatgattgaatcatttccccaaagaccctgtcttttggtcctatcacactggatattcagttctaacatatgaattttggagggacacaaacattcagaccatagtacaaattaaatatgacagaaagtgtgattatttgttgtatcttctgaaatgagtaaggtctggggcagtgcagcgaccaaggtgggattccttctggaatctcaagcatagtgatggtgctggtgcgtaataagtacttgtttacctgtcagttgactgaatccatgcttttccccgtctacttggcctgaataacccattagacaacaattctactccccggtccccatggttaacatagacatagtggaaaagatgcatgggagaaattagccagccactgaacatgtcttcatgacatgtctcgcatctcctcttcttgttgccttcagtgctcaggtccttgggaggcctgtggctggtgtgaggaagacctgttgtttcctgtttggttcttctggggatgggtgagctaatgcatgtggagtgcccagcacccgtgttaggatggaatagacacagtgttctcttgctccttcctgtcccttttatataatcatctgttcattcccaattactcattaccaagtctgcatctttcccagatttgattttcttacagtggtgaagtgaatcattcactggtatgtgtgtgaatttccagaatcagagagtttgagattctcagtttttaagatcctttctgtaataactgaattcatggtggaaaggaatccgttacttagccctgccctgtatttgccgaaggtgggtattcctgtgtgacattagcccactcattgctttatcagttattgacttgatcaatgattctgctcaataaacaaggctaataaggataatttatttgctgttaggcaatttacaagtccttcaactgcatcaataggatagagatcattgccataggaaatacaaactgctgtataaaagcctgttttattggtagtttttagcggggggatccaggcttggattaagaaattcactttggattcctagatctccatcaaaaagggttccaaaagtactgcttttgataaatctactcactgagtgtctgtattcctatcagtagccaaaccctttgtcctaaccagaaagcactcaagaatataaataaaatcatagtaagctttatattttagaggattattttaacatgcgcatccttcaggaggaattcttatctgttcacttaaaaatgtcatttccattttctacaccaaggcaatatttaaaaagaaaagttattttaaaacatgtcattcaattcagttatatttgataagtgcagaattaagtcccagcattatttgacatctaaacatctggtgaataaactactcattaatttttgacagtttctcaaaacacgttcaaggcaagtcgaggaagtgatgacagcgtctcctgacagaggtgtgagttctgcccttagcaatagtgaagtcacatcagggccccggtaccgggacagttggctttcctggtggttgattggaaaggactgggaggctcagttgcaggagcaagcatgggacagcttgtgcagggagctgggcgggaggagagtgccgagcaggaggagatgaggctgggcaagttgggatcagcggctgtattttgacctttccttgtctcctggctcgctccgaccgaccgggcccgggattatgaaacatgttctggaaattatttccagagggcacacgtccctctggtgacagcttatttctggattcccggtgcaaatgcctggactctgatgacattcaggggtgtgtttcatggcccatcatctgattagtcactgaattctaaggactttccctgctggcttcgggtcagagcacatgagtggagaagcaaaataacttgtttatttcctccaggctcatctgaacaggccataaaggcaggcccttcttcctccctcgggtggccccctttatggatgtacctccccatttggaaatggaacactctggcccttcacagggaaatggtctcaaggcagagctcttagaggtgccttatactgatgtctgggctttatgtctggagagatgacttcagtcacctgaaaaatcttggaatgcagagtgagtctaacagattccgacagcctagcctcagttttattttgaataagaatgtgtttatcccagcactctgggaggcccaggtgggcagatcatgaggtcaggagatcgagaccatcctggctaacatgttgaaaccccgtttctactaaaaatacaaaaaattagccgggcattgtggcaggcgcctgtagtcccagccactcgggaggctgaggtaggagaatggcgtgaacccaggaggcggagcttgcagtgagccgagatcgtgccactgcactccagcctgggcgacagagcgagactccgtctcaattaaaaaaaaaaaaaaagaatgaaagaatgtatttgttcttcttgatgctaaggttatgtctgtgaccccactggaaaggtacatggtgtcttggtaggtctgtggttgcactgagaggcagggacatcgtggttaaggcagacttgagttcggatctctgtgccttcctgcgctcatctttaaaatgggtgtagtaatagaagtatcgtgcagagctttggggaggattaaatgagatcatgaatgtgtagcatttaatgcagtctctgacacgtgggctgcattccgttcactttagcgatcatcattattatctgttatcttcattttgtttgagaagtcaaagagcccccaatttgaagctacttccacactaaaaacaagactccaaggggagccaggagcaaggactaatcctgcagctgcctagagcagtcacatcacgggcgccttttgtccaaagccagctcttcatttttccccctgatgtcgaccggcttggtcttcagagtcggagccaggcgccatctgctcccagatttagctgtggcaggtggggtccggtggggagtcagatttcggagtctcttccaagactgagggctgcactgcagctctggaagtcttggtctggttgggaaccctgcttgacttcagtgtttgaccttgcagacatcatttctcttctgcaggccacagtaaaatgaagggactgagctaagctgatcctaagttccttccgcctctaaaactgtgattctgtgactatactggagagctgagaattcctgtatcaagtgggctttctttgcctgatattcactcccaaagccatggaccctgcatgcagggtgagactggtcccaggcagggatgccactgttcgcctgtgggtgaagagcactgcgtctgagaatggtgctgtgctgcatgctgcatgctgcatgctgcatggtgctgaccctctttctcctgccaccccaacatccatacctcacttcatcctttgctttgttttgggtggggacagagtcttgctctgtccccaggctggagtgcagtggtacgaactaggcttactgcaacttctgcctcctggcttcaagcgattcttgtgcctcagtctcccaagtagctgggattacaggggcgcaccatcacacccagctaatttttgtatttttagtagagacaaggtttcgccatgttggccagactggcatcctttcctttaaagaacttaacacctttgttggaattgtggccaaatccacacaccatacacacactcccagtgccctggcttttagctgctgcagatgtttgcagctggtagctgtgctgagcctccgcggaatttccaggcagtggagaggagttgttctcagggtcggctctgagcctcacgcctgcggtttcaacccagttgtctttctaaacaggtacctggcctggggcaagttaccctcaaagcctcatttctccacttttaatacatgaaaaattcaatttaattgggaggtcgcagtgtggattaaacatacagaaacctattatgtgcttggtgcagggcctggcccttggtcagggttccaagaacagagcagctctttgatcgcatagctgatgtacacagaccctcgtcttggtcagggaggaggcaggcagggtgggattggcatggactggtcaggggaagagtagagaagggaagtcagctgacactggaccttttgtgtgaactctctgacgatgggagctcttgacatcctgggactatgttgacatgaggcatggtgaagggccacccttggccttggagtatgtcttccccactcagagaactcatctctggcagctcccaagcaaattcatgttggaaaaacatccttttaatctgccagaatgctcctgcaagacaagagtctgagatctcaggcatccgttgactttggcgccattgacaccttgcactgattttcagtcttttggcaaaaaatgttcccactccatgataatttgtgatttttccatttgaaacaatctgacacatctgtggagttagtatttcctgttggatgggatgagggaataaatgtcagcatgttgagaaaatgaaatgggagaggcatgtttgtcctgtgtcctggtgtctcttggtggctccttgggcgaggagttagagtgtgttgacgtgttggcatgtcagggtccaggggtgaaccaggctggcgattcctgcttggtgaggtgatctgcttttgctgactaatggtcctgtcactctccttgctgctgtgactgatcagattcctcatattcacagacgtaaagtttgggtttttatcaacaccgtccagcttcagagcatttttgtgagagcttctctctgggaatgaatcagtgtgggcttcctgctttcaaggccacctctaggaagaggcagcgttctttctttgtaaaagctggcctggaaattctggtcagtcctagcatttggatggttcatgccaagccagagaagtgaagtaggtgggagtttatctcttccttcttggggtgggatagaggtgttttcccaaggagataaaaggactggtcagactcttgctttctctgttactgtgtgagattagatcaggcaggtgcatgtcagcccaaggcagcgtgcacacagtagctccagctcccactttgtgaaggcagtgtgcatgcaggaaccccagctcccacttcgtgaaggcagcgtgcacacaggaaccccagctcccactttgtgaaggcaatgtgtacacaggaaccccagctcccactttgtgaaggcagcgtgcacacaggaaccccagctcccacttcctgaaggcagcgtgcacacaggaaccccagctcccacttcgtgaaggcagcgtgcacacaggaaccccagctcccacttcgtgaaggcagcgtgcacacaggaaccccagctcccactttgtgaaggcagcgtgcacacaggaaccccagctcccactttgtgaaggcagcgtgcacacaggaaccccagctcccactttgtgaaggcagcgtgcacacaggaaccccagctcccacttcgtgaaggcagcgtgtacacaggaaccccagctcccactttgtgaaggcagcatgcacacagtagctccagctcccactctgcgaaggcagcatgcacgcaggaattccagctcccactctgtgaaggcagcgtgcatgcaggaaccccagctcccactctgcaaaggcgcacgcatggaggaattccagctcccactttgtgaagggagcatgcatgcagtactccagctcctactttgcgaaggccccatgcacgcaggagctccagctcccactttgtgaaggcagcgtgcacacaggaactccaactcccacttcatgaagggctctcttcacatgtggtatcctggaaatcaatgagcgcactcagagcttgcaaggattgaccccaactgaacagcctgggagcgagcggacggaaaatctgtacgtttataaaatatacagtataaaatataaatatctttgagagagagaagaaaaaaaagtgacataagcattctggtttgaaatctaatttattagaattccagcttctcatagcagcttctcattgctcttagcaaaatgtgtctttaagtatggatttgtgtcttcacttgtttaatgtccagcttctctaccactctggaagctccatgaggcagacagcatgtttctcttatctatccctggacctccagggcttacctctgtgcctggcacttaataaatgctcagtaaaaatgcccgatgaatgaatgagtgatttagtttctattaaagagatcattatttacagaagaagaaaaatggcagcagagacctttcctttcagaagtttggcagggatatactgtcaaggaagcaatcccaggtactaagtataattctgaggggggcttctcttcttagcagattaataaaataaaggtgatgagtctcccttggaaagtggctagtgaaaactcagaaaaggaacatggcagctggctgggattgaagtgtgaatgttgatatgagtacagaaatatctgggctaccccttctgattcattcacacattatcacatgattgccttggccttgataatgtcagctgaaataagcatggtaatctctcctctctacccactctatatgtccccactccccagcaaggctggatgagtgtggagccctctgcacttcaggatgataaccttgggagcaccctgtctggctggtacacactgctccaggcagtgggatgggtaccttgcatctcagttcttagagcacatgttgacaatacagttcaaacagtcaaagccttagctactctgaacatacactgatgctaggttggttcgttgtttgttttttagtgacagggtctcactctatcacccaggctggagtgtagtggcatgatgatagctcccaacttggcctcccaaaatgctgggattacaggtgtgagccaccatgcccggccaagtttttttgcttggtgaaatgttcattattgtaaattgtggatgtagggaaaatgtgttttttttttttggtttctcagacctctcgagggactttctaatgaaggagaattttccgacttataagtctgtgcctttccaaagtagaagctgagctccctggaagctggggtgtaggctccagacctcacactccaccaaccacatgcattctcaccagactttgcattagaagctggcgatgatagaagcaggcttaaagtgatctattctggcgaggacggtggtcgatacatccactttccaaaatagcagtggtgaaggctctaggctgcccagccatctggggctgcaccaggtacttctactggtctttctggtagataagttctgtggtgtgatttgggtaacatttatgacccatttgtgttctggaggcaatgtgggctatgcttttgtgaattccttttctgcttgaaccagccagagtcagtcttatttgccaccaggaacccttgtgggtactgtgggtcactcaagctctagaacccatgggggtgtgaattctcaccataatcaccttggggctccctttgggacctctgttggttaccacagaaagttcttcttcattcctgagcatcccttgatgaagggttaagccaggagactactaggttggtctgcctttggacatatttccttcctacttaaaatatggcatttctcctgggagatggagaaggatgggggtggtcattaggctcttggtctaagcagttaggagaattttaaatcattaagagttttaagttcatattatcagccgggcgtggtggctcacgcctgtaatcccagcactttgggaggccgaggcgggtggatcacgaggtcaggagatcaagaccatcctggctaacacagtgaaaccctgtctctactaaaatacaaaaaattagctgggtgtggtggcgggtgcctgtagttccagctactcaggaggctgaggcaggagaatggcgtgaacccgggaggcggagcttgcagtgagcctaggtagcgccactgcactccagcctgggcgagagagagactccgtctcaaaaaaaaaaaaagttcatattatcaactgctaaagtatgcattttagtcctttgcaaattccattcaactctaaaacctagaacccaagtagagcatttacctagggttttcttcagatctttctgaagtgtcacatgtaatgaattcaggtagcatattatataaattcatgtttgcatctgtgttgggatttgcaatttatctgtgggttgaaataattctaaattatctgtcttcaaagttgttgttattcttttacatttcaccatagtattttacatgagctatgttacaggaattggaatagtttataaaacaaagatactaataaacaatgaaggaacctagcttgctttcccaagactgacttacactgtgctcacttagactttaacttcctgtgaagaattcacacaattatctgacatgtacagataaattgtgaaagtttcttcacaaatatgcagataataggggcacactttggcaaaataaaaagtgacatctaggtaattgccttaatttttcccgttattgtctgcatggagagctaacacaatgttagctcaagtgcagtggtgcaatctcggctcactacaacctccgcctcccagggttcaagcgattctcctgcctcagcttcccgagtagctgggattacaggtgcgtgccaccatgcccagcaaatgtttgcatttttagtagagacagggtttcaccatgttggtcaggctggtctcgaactcctgacctcgtgatctgcccacttcagcctcccaaagtgctgggattacaggcatgagccaccacgcccagcccaggaaaactttttgaacgctagcagctgagttacaatgagacttctgatgttctagaaaactgcatatcatacccttatccttaaaatacttgagtggcaaagaggctactaagatgtgatgtcattgggtctccactggatatcaggaactattgtttaatctcaaagtgtaccttcctgtgtctgtcagttaaggaaggtttccaaggccaaggagataatgggtccatttccattttctctattccagcaatgtctgcaccttaacagggtggacacagccctgtatgggtaaggccatgctcagggatgctctcccaactcatactggtgtaaaggaaccttgcaattagagtcaggatacacggagcaaaattagtttgctcactgcttgtgttgagaaagagcagccaaactcagtgatggtcacaggctaatttgttaaaggaatctcctgtttgatgcttggtgagcaaagcctcctgctccactctgctctgtctagccacccccttctcaggtcctcagatgtgccacgcgtgtcttgcttctgcctggaattttcctcccttccaagcccaaggtatcctttaacttaacagaggcaccccttccctgggaggccttttctgccaccccccagacctccaaggctgtctcctgtgctcattctgtggatttctgtctcactctgtactttccccctcataatagcctgcatcacattgctctgtcattgcttgttgatttatctgtgttctccgccagacttaagcttggtgactacagggaccatttctaatctttaccctcctgacgcctggcctgcaattggcaacagtaaacagttgttaaatgcatcggtcatttcaccaaactatgtcattaataagcatctatgatgagtctagaactgtgctgtgagccatggatgattcgagagaagaaaaacatagccctggctcagccatttatgagctctgtaaccttgggcaaggtttctactttgcctctcccaacctcagtccttttatctgtgctataggataagaatactttctttaagacattataaagattatataaaacagtaacacaaatgactgggtaaatagtaagcacaccttagctactgctgttatctttcatcaagggatgaactggccagaagtagtgagggattaaaatgaatgaataggagatctaagaaatgtttcctgtctacctcccttcctccttccttattctcccctttttcattcatccatttcttccttatgttgaaattctgatgagtcagagaaaggaaagatcattataactgcagaaagcaacaaggaaaatgtgtgattaaatcttattttggagtttttttttttttgagacggagtcttgctttgtctcccaggctggagtgcagtgggccactgcaacctccgcctcctgggttcaggcaattcttctacctcagcctcccgagtagctgggattacaagtgcacgcctccacacccagctaatttttgtatttttagtctagacagggttttgccacgttggcgaggctggtctcgaactcctgatctcaggtgatccactcatctcggcctcccaaagtgctgggattacaggcgtgagtcactgtgcccggccctcaggtgtttttaaaaagcagacacttgagtaagatggtcagcatgccaagcactggtctcagtgttttgcatatgattactttctcatcagatcatctatttaagccactttatacacatttacagatatattaaatctccacaaccactatataatatataattattatctcacttttactgatcaggaaacaagcacagagaggttaagtaacttgcctgagattgaacagccagtaggtggtagagccagcatgagcacccaggcaggctggcaccaggggtcgcttggcagaaatgcccctgggagcacaagtatgtgcccagcatagtgagaggacttgacaccagaaacattgccctttagtggttggctcttcaggcaaagagttacaatcacatggagaagtgaatacaacttggaaacagacaagaggcctatagccaggttaggttccccgaaagtggactatgagatggagatgagcatgcaaggcgtttattgggataagcatctgggaagggaggagcaggcataagagtgaagagcggggaaatggagctgtgatgtggtctggcctcccggggttgggagaaccattcttcagtgatgtggagagtaaagggtgctgctctttggaagcaggtcaagctacatcaggctctgcttggacttgaattgctgctcattgaaacagagaagaaaactagtctgatgaccactgtgcaggatgaacccaaatgggaaagcctgagcgtggtacttatgtaccaaaagggcacctagggtgaaatttcactttctacccccattccactctgggttggactgaaaaacacgcactggtgcaattaaggatgtaaaaaaattaaccaaaccagcggatatagctaagaactcaagtaaggctaagcttgctgttgaacagtgacgcaaagtcaccccggtgtgtcttcggtgggacagtgatcatataaaatcagatgttgacatatgaaaacagtgtttctgatttgttaaattaccacattaacagcaagtgctgctggtttgatttgcacctgatatgataagaagctaattatatgacagggcgacccatgtggcagggcaatttcagtcctagcaacacaatatttacctggacagcaaacagtcaagctgctaattcaagatgcaatcttttccagaaacttagccaatgcggtaaaaaacaacgttccccattcctcacacagacactcgccaggtctaggaaataaactataacttattttttggtcaactactgatttagaaatgatttactgatgaccttttataataagtattttatattaaatagtcttaagtaaaaatgtgtgatctatgataggcgccaagacacagaatcccagactttatttgcatttgtagattttggaaggtagaaccccatactttattttttatttgtaggttttatttgattataaaagggaacacataggtgggggaatttttgaaaatacctaaagtgagaatcatagagataatcattgttactcttggggtatatagtttcttccagattttgtttgtttgttttactcaatttcaaaatatgtaacatattcttttataacttgtatggtgcgtgtacgtgtgggtgagggtatgtaaatacagcagttggcaaattatggcccacgctcatctgtctgcttactgcctgtggctgctttgatgccacaatggtaggattgagtattgtggcaggcactgtatggcccacaaagctgaacatagttcctgtctagccctttatagaaacgtttctccatccccgttttaatatgtcaagcagttcatgccatcagatgttcttcagacaggtgctttgaaggaggcatagtgttcacgtgagtggatcaaagttacatataactttaccttgtcccttcttgcacatatcccacctgctgggaaaccctcttggctttgtctccagatgtgtctcagaaccccctgctatcacctgggacaggtctcactcctccttggccccctaatctttcttttgctcctgaagagactggcctccatgtcatccagagctgactcctgtcccaggcaggtggaatatatatccatcacaaggtgaccttgaacctggggtgaccgtccccttttcattgccaaggtccaggtaaagcttgtcaatataggcttccaggaatataaatttaaagagtcatattttttttactcatgtgaattgtaatctctgtaaaatcactgttaatttagttatgttaatatatgtaaaaatcacatcttatttacataatatgttaatttcaaaatgctgcttttcctactttctctttatgccaggtttattgacactaaggccactttttgaatctaacacattttccggaacacgttgtcttcactactaagctgtgataaagcgtgtttaaaaataagagtccctggccgggcgcggtggctcacgcctgtaatcccagcattttgggaggccgaggcaggcggatcacgaggtcaagagattgaggccatcctggctaagacggtgaaaccccgtctgtactaaaaatacaaaaaattagctgggtgtggtggcgggtgtctgtagtcccagctactcgggaggctgaggctggagaatggcatgaacccaggaggcggagcttgcagtgagccgagatcgtgccactgcagtccaatctgggcgacggagcgagactgcatctcaaaaaaaaaaaaaaaaaaaaaaaaaaattagagtccctcgaaattgtactaagctatggacagctattttgatcagtcttcatcacacaaccacttactatattattaaaactttttgaagaaacttttgcaaggctatttacaatgacacttagccttttcaactgtgaggtcacacccccagaaagaattatgagatgtgtaataaactttcttcttcttctctttttgattattcttgttattattatgatttttatcaattctatcaggcaacttctatgacatctaaaatgctccaaactagcattaatgccatttcagccattcttccttccccagaacttctaaattcaaaatagatagaatgtatagccctggtattttgtaagatcacaaacacatggctacatcctgtttctgagagataactttaggtaaagtgaaggaaaactttgccttgtgttcagatgtataaggtgaaatttcaattgcacacagcactgtaaagccctgcccggaggagcaggctgacttggtggtttagagctccaccctggagccagatggcctaggttcaaatcccagttccccaatttacaagctctgtgattttggccaagtgacttaggtgctttgaccccatctctaaggttttccaggaagcaaattctgaggtcgacaaatttaacaggggatgctcttggaatcatcacctggcgggggaaggtaaaggaagcagcactggatgagggagaagctgagctgtgatgcaggcgcaacaaaggcctcagcccacaccttgcagagttgtcccaaattgccacgaggaggccagtctttcgcacccctgtgctgatcagtcattggctcaccctaggaggaagtgagacactgtgagtgttagttgtctgtagcaaagatggtacccaaaaaggactaacagctgtgtggcatcctctgcagcactcctgcagctggaggagtaagcccttcattccgtaagggggacctggcggtgtgcatcacagaaccaccacgggggtgataacagtccctttctaatattcaattagaaatagaattagaaatattgaatatttctaatattctgatattgatgattataatggattaagatatgtagaaatgttagaacagtgtcggactcacagtaactgacatgtatttgttaaacaaaattaaaaccttgggcctgactcatctccttctgtcactgtcttcttaattatgctactaccttattaagttccagaccctacttctggaatatgccagtttcactcctgactaagggtctttatagttattcctgaaacatctctttttgagtccaccttttcccatgtaatgcttggggggagcctctgggaatagggtctcaaagcctcattcctgctttagccctggcttgtaactaaggcagttgacactggtcctgtgacttgttagctacatgttagctacatgattgcacagaatacgctcccagtaagcatgtgatgaatgaacaaatgagactcgagattttcttatctgctcagtggcatgcctgtggatcaagactgattgatttttcttggaaacaaaatatttctctacagaatctccctgagccatttgatacccacagcaatggccctccatgggcatcgggagagctctctagtgtggtggttaaattcatgtcaacttgcccaggcaatggtgcctcgttatttggtcacacaccagtgtagatgcaaaggtatttttcagatgtgatcaatgtggttaagtcagagcactttgagtagggcagattatcttccgcagtgtgaatgagcctcatccaattaattgaaggccttaagagcaaggacccaggtcccttgaagaggaaggaattctgtctgcagacttccctcagactcaaaatgacaacttctgcttctttacatccacaagatggaattttcagcccgttggcctaccgtgcagacttcaggccctcatagtcacatgagccatttccttaaaatcaatctctctctccctctctgtgtatatatatacacagcctattggttatcttttcccaaagaaccctgactaatagacctaggaattcagtgctgccgagtctctatcccccagttttgcttaaattgatcccctagttttgcttaaattgctgctatgtttgtctggggatctgtaatgtgggcccaggacttccatcctgggcagaggaagacgccatctcatccgattaagcctgtttcccagctgacttgctcaagaggagccttgctggtgcctttggggtgtgtaacttcattcactgtgaagaacctaggaacagttgtttcccattgttggtagggcctccctgtccatctcctcacatgaggtcagctgcactttcgtggcgggggggaagggagaaaggggcttgagcatctcgaaggacgcagatcagcacagtgttacccgcgcacatccacctgttggggctggaggacgcaaatcagcacagtgtccccccgcgcacatccacctgttggggccagaggatgcaggtcagcacagtgtccccctcgcaaatccacctgcaggggccagaggacacatgtcagcacagtgtcccctatgcacatccacctgcaggagccggaggacacaggtcatcacagtgtcccccacgcacatccacctgcaggggctggaggatgcaggtcagcacagtgtcccccgcgcacatccacctgcaggagccggaggacacaggtcatcacagtgtcccccacgcacatccacctgcaggaaccggaggacacaggtcatcacagtgtcccctatgcacatccacctgcaggggctggaggacgcaggtcagcacagtgtcccccgcgcacatccacctgcaggagccggaggacgcaggtcagcacggtgtcccccgcgcacatccacctgcaggggtgtgcaagcacatgttgtttcctggcctctcatacggcttctgacacagcacgtcccttcctcttcacttaacttttaggattgggatgatgtttagattttaactgcttgggaaggacacagaagctggagtagcaggagtgtcaaacagccactgccctctacagtgttcaacacaacttgtgatttcattgtcctgttaaaaataatataaaaccacatttgatagaaacaaattctccttggttataaataagcaggccgaaagcagcgtctggcagcgtgaatccaccatgaaaatttatgatgaattgtgtgtatgacgttgccatggtttgatgctgaaagtagatggatgtaaagaagccaagtcccctttctattttaaaccttggacttcctctagtacttgaaataggaaagaaacatgaaaggtaaggactagtggcacacatggaaaggaaatctggatgtggtttaagtttcggagattttaccaaagtgaagggggaaatggtaggctgttgttcatggctttcatgggagtacattggaaatggttcacacggctcactgcagtggagacagtcacagcatccaggagcacatgtgtcgccttgtctcacgcgtgttggtggagatgcactctggggcacagatgttgcctgactggtcggctcagctcagactctgggttcattgctggtgttgcctgttggctggggctgatgctgggtgggaaggaagtgccatcatctttgagggaactgattgctctgtggttaaggctgagctcagatggaaggcggggcagggttggaccagttgaggggagccctgctgagagggcagagaggggcgctgaggcagagaggtggctccttcaaatcgcctggggttggaggaggaatcaacagaaaggggaggcaagaacaagtttgtggctgaaacaaacgtgaacatcaaaatcacagagcactggattaccgcccaaagtatgtgaaaacacacgagtcttcactgatggaaataaatgattggacaaataagtattaataaattggggggaggggagaggcaggtcttccttgcaagccaccaaatactgtacgttgatactcccccattcaggagttagagtcctgtcccttgtgccacactccctccctctttgagcgtggattggatttagtgacttgctttcaaagaatagaggatggaaagggaaaaataataactacagttgcaaatttggcaagctactttatccaagtgatcaagttaacgacaccagtgatatgccatttggacatcgtgagccccgaaatatgatgtgaggagaggggcgcttcacctcatggactctccccccaacccaaaatctcagcctaatgacgagaaaaacatcagacaactccaaactgacgcatctctacaaaacactcctcagatctgtcaaggtcatgataactgaggaaagtccaggccattctcatagaccacaagagaccaagctgataccaagattgaatgtggcgtggtgcctgggagggtatctgggtatcctggaagggatgaagaaaaaaacaaaacaaaacaaaaacctagcaaagtacaagccaagtccggaatttagttcatagtgtcgtaccgatgggttgtagtttctacaaatgcgccatggtaatgtaaaatattaacagggggaaaactgggtgagagagatcaggagctctctttgtaactcttctgtaaatccactgttgtttctttctttccctcccttcttccctctctctctctctctatctctttctttcttttctttcttcttcttttttcttttggagacagcattgcccaggctggagtgtagtggcgcagtcacagctcactgtaacctcaacttcctgagtgcaggtgatcctcccccatcagcctcctgaatagctgggactacaggcttgtgctaccatgctcagctaactttttaaaatttttgaagagataaggtcccactatgttgcccaggctggtcttgaacttctgggctcaagcgatcctcccaccttagcctctcaaactgttgggattacagacatgagccactgcacccggccccaatattatttcaaaaaaagttattaaaataaaacaagtttgtgtatgtccatagaagagggggctggatgctggaggaaacccctcatgaggaattatcgtggagacaggagattggggattaacaccatgaaagtcttactggatccagtttctcttctcagagtctttaagattcaagttttgggtttgttttactctatttttaaagctcatgactttttctagtcattgaaggtgttttgctcataccccgatagaagtgaagccacttactggacaccttcaagttgctacatcatttggaatcctgaggtggcctgaaggagataaccccatgtttctgagaggacatgtgataaactgtgcctctcaaacacatagtttatctccagacagcgactgaggcaatgaggaaatgaaagcccattagattactggaggaatccgcccttcctaagaagcagttctgagatctcataaatcaaggccttttttttttttccacatatcaagatcagggtgttgctcagcttttcttgtagcaaatgcttctccaggagctggttcctcttggaaaatgcctagataccacagggtggtggtccagaaacacatttcccaagccccattgcttggaggagaagtcctttcagtgtctgaggcaatctctcatcccccttcaaggctgggtcagcaggtgaagctcatgcagccaagaccgcaaggccgtcagatggtacgtggcaaagagtgcccagtggaggtgctctggtcccctgtcccacaccccaaagcgaatatggaaataatgatttacttccagagctgcaagctgcaaagtctccctttcaatttggcttctccaaaaactactgggtaaatggataaccaagaaacatcttatcagttgctatttaaggactgaaatcctttaaacctgacatcagcagagtgcaataaggaagatcgacgtgtaacagaacccatagttaaacagaaggttatatgtaattgctcctgtgttgcattgtgcttttcaactcaggagataaggtttgttttgagctgagggccaaccttgttgattcactcctgtctctactatccacaaagacctctgtctctatggtgtgtggactttgaaaatttccacttccttacgtttgctaagagcagtgagacttgagccagagctcttttgctgctatgatgatttgttctaaatttctcagaaccaaagattctctgtcaaggaactttgcccctgaaatgcacaagccgtatcaccttagaagagagctttaaataggaaagcatgcaggaacatccttcaggaacaggggagttctgtggagggcagcttgaaccagcggcaatactaaccccctagggaatttggtttttacaagtgtttaaactgtggggcatagggttttagagaagttctgagggatttgggaggtaggatgggaggggagaagaatgggaaggaagagagatagcaaaagaaagtggcttcatatcagaggcatagcgattatgttttaatgagaagaggaatgaggaaataagcaggaataaaaccagttccaggtgacccacaggacttctgagagggagtcacaaaccagaatttataaagaccatgttcagtgcaatgaaaggagactcagtaaacacaggactcaacgcagaacaagtcagtggccctgggtgaggcgtgaggtctgagccctgccctgtttcctgcagttatttctctggccttcctaagctgtcaccaaactgccccctgtccctctccgtgtttccagaggctactcctgtcctctgaattccctgccacctcctgctcctctttcccacctgccattacctcacccttcctggagtgaagccaccagtgaggggcaaattgtttctcacagactttacactttgcatcatgttttcaaatggtcatcaaccactaaatagcgcaacttaaaaattattttaaattaatttaattaattttaactgcaaaaaccacaattacatttgcaccatcctaatagcagcagtcaatgaacttttcttaaaaaaactattggctgggcgcggtggctaacgcctgtaatcccagcactttgggaggctggggcaggaggatcacaaggtcaggagttccagaccagcctggccaacatggagaaaccctgtctctactaaaaatacaaaaattagccgagtgtggtgatgggtgcctgtaatccccgctactcgggaggctgaggcaggagaatcgcttgaacgcgggagacggaggttgcagtgagccgagatcatgccaatgcactccagcctgggtgacaagagcaagactctgtctcaaaaaacaacaacaacaacaaaaaaaaaaccacaaaacccccaaaaaactattgattagaaaggacattaagcctatcaccatagagatgagcatgacaaaatagggctggggcaggacaccacccttgcaggctctgactcttcgcccgtgtttctgtctttcctcaccccctccccatcatgacttttgcaagtccatgtcctgctctcctggccttctctcccaccgggctggcctgtcccccagcagcccttggatggctgcagtccgctctgtccaggccatgctttccaggtagcttggcctcaacatacccttttgggaggcacagtccaacccataacagggtcaggcggtaggggtggcacggactggacaggaaaggggtgagaagctctcgctggccaaagtgatggtccatgacaaagacgtggttccagctgttggtcccagctgagaccataacaaacaaatgaacaaaatggaagttctgactattcaggataagaaaatagtgatatgttgcgtgaccttacaatttgtggcctatccaggcacggagagggggcctgttaatagttataccagcacaagaggtgcaactgggcagtgtctgcgttagactgggaaatatggtgactacagtgatacttccacaacaagaatggaggcggtccacaggagagctcaggggcagggaagcttcagaggctcagggtgttggtttgagtgtcctggttattttgggctgaaaggagctttgaggaaaacactccatgtactaagctcaaaaagagaaagataaaagggtaactgggttaagtctgatctaattattatgagaagaggctgagaaaaaggttctgctttctcctgctggctgtccagatgaggcaggacactgcttacaactgtatcctgagcaactctgggtttccaaggacctgagtcaggggcaatctttgcagggattgataccatgtgtcagtgacctgcccccatttaaacctggggaactcttgttggtttggttgttgtatcttttacttattaagatttgctataacatagtattttggagaaaaaagtttgtattgctttgaaagccgctgatctaggacaagtctcagtgtgattccacccaccacgcagcgagagagagggggtaccatctcttcctcagcagcggggtgcacatagtcatcattcgtcagattgtcattatcgatggcatcatttacaacacgtgtatagatgctcatttgatcctttgatttttgtttgtttgggtgttttctttttggtcagtttgatctaaggagaaaaatatcctcttccactttgttccagaaatatcctgggtttgatactagttccatacccttatttctctttggcaaagtgcataatacattctctgaattttcacgggcaacaaattctgtattggtgacattggaagtctttgtgggctatggaagggtgaagatgggaaattcttagactcttgagtcagtgggtggagggtttgcttcaattttctttcttgtattctttcagccaacacatgtcttttacgaaacagtcagcttctcaaaggcagggactctgtgctctgacttgagcaaaaatcctgaagctgtagaggctgactggagaggtgctcctgaaggcctgtgtcccaagtgagtgggtatttctttcctgtagggacagggaaccctggaaagtctccttacaacccccttttcatttaaaagtaatcttttttctttttatattttaaaaactatttttttcttaccataagagtaatttgttgctgaaaataaaaaagaaaaaaacaggcaaaaggataagatggaaaatactcattatttccctaagccacagaagaaaaccatagtgtaggtccttgaacactttttctttctctttttctcctctcctcccttcccttcacccatcctctccccctcctcctcctcgccttgtccttctagtttgcctttccttctttgtacatatctttccagatatgttcatcaatatataagtgtatatataaatatataaatcagtatataaatccataatatacttatataatatataaatatatagtcaatatatttacatatattacatttatatataatcactatatttacatattgattatatataaatacatatattgattatatataaatatatacaattatatgtaaatacattgattatatataaatatacatagtatgtagataaatatataaatacataaatgtatatttcacatgaatgagatattatatattttgatttctattctttctctctctcttttactaactatattagggaaagactttcctaacaatgtcatcctttttaatggcagcataggatttcattgaatcatacaatttaacctcttactgatagacctctaggttgttttcatttattggctgttgcaaagaatgcttatatttattttatctctacattttaaattttgtgtgtgtgatttgtgaagtccataatatgtttacaagtaatatatgtacattataaatgtatatgcatgtaatttgtagttgcacaatatatttggagggtgtgtgctgctgggggtgcttgatcaaaaacatgtggctgcccctcacctcagcaacagatgatgaattgaactaagacagtaacgcagcatggagtctgaggtggttagaagtgtagctcaatatgttagggttgatgggacttggtgatagtctgtctggtgagggagagggaagaattgagtatagcttccatgtgtctgcctcagttgaccatttcttcacttacttaagtaattaatatcaactaataagataatctaaaaataatattaatacgctgtattctaggagccagctccatcgtgctttgtactattgctgagatacaataataaacaagaacatccctgccttaaattctggtgaggtgggggattcagataacaaacatgtgaacaataaaacaagtttctagcctctgcttcaagagtgttcaggtcaggcctacacatcctggccgatttggaatggatttgcatttttgttttctggatgtaagctgcattctgcctcttctccaagactcctattagatatatcttcctcctcattccaagactcctattagatatatcttcctcctcattccaagactcctgttagatatatcttcctcctcattctaagactcctattagctatatcttcctcctcgttcccatgctccttagggattacttttcctcactcagtattgttccccctgcaggcatctgttgcttcaagcctcacatatacggtttagaaatcttatgattttttttttcatttacttttttcttgagatggggatttcacagtgttgatcaggttggtcttgaactcatgggctcaggcgatcctcccaactctgcctcccaaggttctgagattacaggcatgagccactgcacctggcctcttatgatctttttggaattaatttgggcttgttagatttttttttttgttatatgtcttgtgaaaaaacatttagaggtacatgtttaactttattgtctactgtgtagtttaagaaatgtcaaaaccaggaatacagcctgattgggcacactagaggcaagagtgggagagggtgaattcacagacctggccagtctcctcctggcttcaaggtgataatttaccccgcaattctcagacttcacttgtaccagaaatgtttgggggaaatgtgctaagatgcgggtgctcaggcccttcccccagcgattctgattcttggaatttcaactgggactcaggatctgcattttgaagcaagttcttctggagattcggttgtgctgttctacagacaacatttttagaaagactgacttaggggaggtgtttttgatctctgtgtcttctgtcatttaagaagatttttcagtcacttgggctgattgataaatacagctgatcactcaggacacaatataaagttcctactcagagagaagctgacttgagctatctctacctcgaaggggtcttttatagtttcaatcatatatggatgaaaaagatgctgtattctttttatatgaactactttgtgtattttataagtagtataaatgtacgaatatcccatttaccagacatttggggtgcatggtatagacaactgaaggttattcctttaagttgcacttttttttttttttttgctttatttcaactatttacatggaactatttcttaatttagtgtatgcttctgtcctttggcaaacacaatctactgaagatagttaaatcttttcagggtcatcatatatgtttttcattctttcaggtctgacttagatttgttaaagcccctactctgaatagcctcaaatgtgtttgctcttggtctgccatggtttttagagtttttcttttccctcacggttttctgtcatttccctcgcgcattgctgtgcctggctctaggagctttctaatttgctctggggctgggaaatcatgtgactgcagactatatgttgagtaatagtgaagaggatttgaatgagtttttgagaagctgttctaggaataaaatggatgtactttgctgcgttgacttggtgacattattctagtggctcaactaccttcttctaacttacttcctgatccttaactgcagttgtcatgtttgtgacctcctgacaagtgagttattgctagaaatcatttatcttgatctgcaaacctttgtctcccccagttgtgttagtgtttttatgtatacagttctataatgtgaaacgtataaggattaaaactaaaaaaattctcaggccaaaaatagataaattgagatattgccaagttatatgaagaaaacagattggaataaggagattatgagaatgacataaagtatttattatgtttctttaagagaagaaatagacaaggataaaggaggagcaagtttcagaaaggtgatggattctttgcacttgtttcttggagatacttgtggggcttccaggttccaggaacccttttacactgctggtgggaatgtaaagtagtacaaccactatggaaaacagtgtggagattcctgaaagaacaaaaagtagaactatcatttgatccagcaatcccactactgggtgtctacccagaggaaaagaagctattatatgaaaaagacaattgcatatgcatgtttatagcagcataagtcacaattgcaaaaatgtggaaccaacccaaatgcccatcaatcaatgagtggataaagaaaattttatatatatatataatatatatacacatatataatatatatgcacatatatttatataatatatattatatatatatatgcatgccatggaatactactcagctataaaaaggaatgaaataatggcattcgcagcaacctggatggagttggagaccgttattctacgtgaagtaactcaggaatggaaaactaaacatcatatgttctcacttataagtgggagctaagctatgaggacgcagaggcataggaatgatacagtggactttggggacttggggggaatggtgggagggaggtgagggataaaagactgcacactgggtaccgtataaactgctcaggtgatgggtatcccaaaatctcagaaatcaccactaaagaacttatccatgtaaccaaataccacttgttccctaaaaactattgaaataaaaaaattaagctaaaacatttcaaaataagatagaaacattaaatatctaatgaatggaaaaataacacggaatatactgaagatacaagtgaaacaaggcaaaaatacaaattccaaaatgaaaatatctgtaccaacctcacgcaggtggcgtgaggtggtgctgagaaccagcaggccttctttgggccaaatttctggttacagatcccacaagtagaaaacaggacctttgggctctcccgtatttgcagaaggttcaacacttcattccttctaggttaaaaataagaatgtgggagggagatggctcctagagagccttgagctctaggttattcatctcctccccataaatcaagcaaaagcacccatgatctcctctccccaaacccagcttttaaattaagttttaactcagaatgagagtgacaaattccttaatagcagtatataaataatttttgtgttttgaccaaatttaattcaggcatatcttaaaaagatcaatgttaatcatatttaaaattatgttttgaagttaatttaaattatatgtttagtctgtcctagatattaaacacaatatgaatttttaaaaaaagaaagtgctgtcagaatagagttaccagtcagcgtaaaataatttgtctcatcaaagatcatgacaaggaagaagtggacagaggtggcagggcacagagtcaggggtttgagaacaggggtttcagtcaactgagaggctcccgtgggagaaggagcatcgaacagagaaaacaggactcattcttgcaaatgtttttctgaaaatggcccaagtggcagataggttcagatatgaggatatagacttgacttgaaatgcccaccatggagatattctttcttctgtctgagagactggttgattattgtcttaagagtgaggctttggggcttcctctagtggagaaacagtccaaaccaaaaagagccggtccatcggatggctggtgtaaaaatggacaatgtcttttccagtggcctggccatttaaataaaggcacatattggggcatggagttcttgagtttgggactccttgattttggtttaaaacgtgtgcaaggaggtccccttggtccctgtagctgttgcggctctaaagacatgtgtccatttgccttttgtaaggagtttccccactgtggctgctgtaactctatgttgcctttgctaagggtcacaacatttatttagaaaagcacaggttctggatccaaagttcttttacatgaaattggctggagttctagatggttgagttctagaatcctcagagccagatgagcccatgattccctgtcttctggtaatcttacctagctactgaacccagtccagtttctaatttgacccagtcagacacctgaggccttcctacagacccagccctatttctgtcatgacttctgaaccaatctgctccaaacaaagtgctcaaatatactcagagagcccaaaatgcaaattcacagagctcagaatccaagagagaactcaaccatgaccccagttgctgcgagagatcaatgggcacagtgggccctggcagttaccttcgcttggtctctcggtgtttctgggaatcactagaggtctactttgaatcccgtttctggcacctggagcagcctgatgtttctgctgacatctcctcaatcagaacaatcacagaaggcctcatttggctccaacaagtctgagaaatgtagttttaattttggaaggccatgtgtactaaagttgggaagggatatgaagagacaacctgtcttcacgctggcatctgcatttggccattcattgctaatattttcctatgacatccaagagggggaaggtctctcctagtgtctcagatagaaagttccagagctttaatcaaagcagctgtagaggagatagaaaaaaaaaaactcggactgatggttatgtgaaggggaaaaaggtgtcaagaaaggtgaacgtttagctttgaagtggcaatggttttctagggcatactatatgatgaaattgcaaaggagaataaaaatgtccatttaaagtatattactaatattaaatggagatacatttggaaagagagtatatacaggaaaatttaaaatgtggaggtatctggtcccttgggcttctgcagcatgtgtaggctctgctggagtggaaggacacccagccaaggcatagtgacctggagaggtgactcctgcctctgtcacccgcaagtcacctgactttgctgttccacagtttcagcatctaaaaatcttggtgatcacttctgtggcactcagggtctctcccacatctgaattctgtgagtccttaagttctagatgtctagtaggtttcaggtcagtgaggaaacgcttagcaccttagtccccagcagggtgaaaggtgccatctgggtgaagaagccatgttaggccttcagtggggggacacttgtcgattgtgtagctacactcgggatctgttgtctgtactgtccttgttttccctctgatagggtttggatctgtgtccccactaaatctcatactgaattgtgatctccagtgttgaaagtggggcctgctgggaggtgatgggggatcatgggggtggagttctcatgaatggttaccaccatccccccttcatactctctcttgctccagctctggccatgcgatgtgcctgctctcccttccccctccaccatgattctaagtttcctgaggcctccccagaagctgagcagatgccagccatgcttcctgtacagcctgcagatccatgagccaattaaacctcttttctttataaattacccagtcttaggtatttctttatagtaatacggggctggactaatacaccatccttgttcctgtgaattgtaggaattaccacaaatgtacctaaaggggactccatggttggaacaagcaattttaacatgcatgacagggcgctaaaacaaagtactggtgctccttgacctactgtggggttatagcctgagaaacccatcctaagttgaaaatattgtaggttgaaaatacgtttaatccatctagcctactgaacatcaaagtgtaatctagcctaccttaaacatgctcagaacacttacatcagcctatggttgggtagaatcaactggcatcacagttcactgcagagtaccggctgcccaccctcttgatcgtggggctgactgggagctgaggctcctggctgctgcccagcttcataagagagtaccccaccacatgtcgctagcccagaaaaagatcaaaatttaaaatttgatgcacagtttttgctgaaagtgtattgttttgcaccactgtaaagtcaaacagttgtgaagttgagccatcctaagttggggactgtctgtaatggtaaatatttcctgttggtaatagctaattcatctgttatagcactaaatcagttcatcatcctttacaattaagaggcaggtctcagggatatattcagttctgtggtaaccagcaactaagatcaacaacagttatgttcaggtatgcaagaaatagtaagctagaagctcaggagaaagaaaaggtaaaattcatgggttagaatgatcagagctgaaagttagataagagaattagccttttgtgttgattaggttttttttttttttttttttttttgttgttgttgttgttcttgttgttttttcgagacaggttctcactctgtcacctagactggagtgcagtggtgcaatctaggcttacagcaacctccgcctcccaggctcaagtgattcttctgcctcagcctcccgagtagctgggattacaggcatgcgtcaccacgctcggctaatttttgtatttttagtagagacagggtttcactatattggccaggctggtctcgaactcctaacctcgggtgatctgcctgcctcggcctcccaaagtgctaggattacaggtgtgagccaccacccccagccgataagattttgtacaagtgccaaaatattatcattgataatattttcagcatttcaacttttcagttatttaaaaacctggaatttctaatagtatagcacattgccctgcctctgacaggctctcgcacaccccgaccttcagagctcagcctatgactgttttctttcaagtccctggtatttcagttgtgtgtctgagtaaccacacccagttcatcttagactttgaagtgtctaaaatgttaggtcttgcgtaaaatatgaaatgccttaaggaattgttaattgtgagatgcatacatcacaaaataactaacactatccaaaagaaagcagatattatttgttttgacatttctttaatgtggtagaaagtcactttcacacatacaaatggtaaaatatacattaaatatagataacatgctaggattagctataacataacaacagaatacacagatttttatttttttatttttaaaatttattttattattagctttttaaagaaacagggtcttgctctgtcacccaggctggagtgcagtggcacgatcttggctcactgcagcctccacctctggggctcaagcaattctctcactccagcctcccaagtttctgggaccacaggagcatcccatcaggcccggctaattttatttttggtagagatggggtctcattgtgttgcccaggctggtcttgaactcctgggctcaaatgatcctcctacctcagcttcccacagtgctaggattacaggcgtgagccacagcacctggcaacacattttgaaaataatattgtttcttaataagcagatcttactttctgccatccctaacattcctagtcaagaaaaaaaaaatggcttcaactttttgtccaaagctttcaggatatattcctaaagaaatctcagtaatatttcttctggcctttttgagagcaagatttgaagggatttttgtcgtactcttttaaaaaagcaaatgagggatggctctcttcagtgacaagccaaactatgaaaacatccagacccacaatccttcctgtgccagtgtcaggctgcccctaaggacagggaagtcctggggagaaagcgttttgcccagatgaacacgtgaactcaacattcgtgtgcatgcttccggtgagttgagaaatctagatgacccgaaaagattttcttgcaaagcaatatccctcaaaaccccattgcataatggcttttgttttaaacctttttgagtaagggatctttttgccgagtggctaggcgttctccaaacaaaacccccaaccctcacaggtacagcctgttttgctgtctgctctccaactccctcctgtgacttgaaggaggagatttgatagcccagggtgatgtttcaacctcctgtggccactccacccttaggtgggtgcctagtcatgccagaaaaaaaaaaaaaaaagccgggggaagaaaaagggcaggcgggcctaggtgaagtcatccaatgaaggttactggctgagcggggacaccttctcacaggactggagagagaatgcggggcagctgggcagggctcacttccagccgcctgtcacagtactgggagtaagaggtgacctatttatttttagaagggggcagtgataataacccagctcctagcttcattcaagggaggcaggcgctttggaagtttgtaaacaccaactttctgagtaagggaggagcactttttttccaaaaaggaaagaacgtctctactgggtttttttcctcctgatattcagcattagagtagaaaagaaactattgtttggccacattagccgtggttagcaggtgctgcagcctttgccactgttattatttttaaagggcagaaatgcctgaaggtgaagactttggaccaggcaaaaggtaattgtgatatatacgtacgtacttattcttcagtctgtttcactggctagttatctttttaaaaatattatgactaatttaaaaaggagtttaaaatgtaaaaatatgaagaatgcagtcctttaattccaggaaacataattttctttggcacgaactcactcaagagaggcaaataacttaatgtcctcttaaaaacttatgccaataagtgcttttcttgaatcagaaagtgatggcctgaaattttttaaaaaagtgtttcccagcacataatgtagaatctacttgaatgttttaatgttgagtttttaacattagatgatagttgttggaaatctaagctattgaacatttttaaaaacctattgcattttaaagatttgttaagcatttccacagtttaaacattggaccaatataccattttgatattgtaaaactttttaaaaccacagttcctattgttgaaaatgtgattacttgggttccctttacagggagtacattaattgtatcactgtttatattaatatctaactctgagaagggggagatcaagagtacagaaaggaagcagacaattaattcctgctcatatgagcataattgtgcccagagtgaaagtctgcattttagccccattgctgtgaacaacttttgtatgagtcagttagatgccttcattggaattctaattggggccattgaaatttggatatgaagtagacagaacattattaaacaagaaaaggagttggacaattttcttgccaaagaaagtggaaactggtaactctctaggaacaagggcaccaaaatatatttttgtcattgtattaaagacaagcatcccctttcagccatgggtatatggggcatgtttgtgtgtgtggtaattataatcagttgtagtagagtctgtaaaagctacttttctctagttttctagtttccattttcttacaagttccttcctagtacatcaacattatgttgacatttaattgaacaatgaaacaactttctacataaaatgacacagtaaaccaagtacttgaagatgacatttacagaaatgcttagagtgggatatgggttaactagctggttaagaaaacatttccagaaaagtgtaaatgtcaggttcagttttgagatcatgggttgatttactcgtatgtatccccttcatgacattttaacatttctggaagcaggacttttattttcctcttggcacctaggcactcccaccagctctcttcatagaattttcacagaacaggcatttttaatacatacttgtagaatgaaatgtattgataagctatttgatatgtgcagtacatatttatggggcctactcattttagaggttgaaagaagggagagatttggcagaaatgtgattagggttgctttaatgaaatgcaatattttcacaattaagtagtaattattgataaatattttgaaccaacagtttgtgatatatactgaacaaacataagaatttttttctaagaatgctttactggttaacaaggcgtaaccagataggagtgtatagatattatatagctatacattcacataaccatatattatacacacatataatgattattattaccaaggattagtaatatattggattgaaaatgagagactccccgtcctttgaggtagcatattcctgtgccacctccccctactacctgtagttttaattttgataactttaagcttttacccattggtggttttctatgcagtatactttgtcttacttcatacatttgttttttccctatctgtgcagaaagaaggggcatcccagacagggagaaagtttagagctaggctagaaataaaagattacaactggcctggtgccgtggctcacacctgtaatcccagcactttggaaggccaaggcaggaggatcccttgggtccaagggtttgagaccagccaggggtgctgaggtggatcacctgagcccgggaggtggagattgcagtgagctgtgatcagcccactgtactccaacctgggtgacagagtaagaccctgtctcaaaaaaaaaaaaaacaaaaaaacaaaaagattgcaatggaacaggaatttgactcttgctaccttcgagatgaaatgccattggacaagtctttgggtgccttgtctgaaagagaaataactgttggaagttgtttatctacttacaaagtacattcttagagcttgattgcagcaggttctagttgagtctcacactgaggctttttcatgtgacttcagttccattttggcacttggtgtcctagattgctctggaaccatcagtgagctaaatctcagttttgtttttaaaaaaatcagtggaagccaaatgctccgcagcttcataagtgtatccaggtgtagggcccaggcatccagggcagactgccatgcgtgccctggtctgatggccccgaggcaccatttgatattcaccaaatggacttggtgaaccaacggcctgagagggggcaggtccaggagagacccccctccttgtggtttatcttatgtcagccatacgtggtattagtaggagcctctggagactccatgcccttttccaaggtcaagagacgaggggagagggtgagcctgaatgccactctgaagcaggcgaggaaggcagaagcccaaacagggagcctcaggggccagagaagaaggaaagaacaatgggggcagcgactaggatagcagacagggtcaagaaataggaggaaacgtgtaccctggccagaggcctggctctgcagtggttccttggccccaccttggagccggggcctgggagggcctctgacgccttcagcaagcagcctgggctgaggggtgtggaaagggggacggtccctgttccagctgtcctgaagggagagggaccctaggcaccaagacggagctcttcatgcatcttcttgtggaagcgctttccagataacttccggataattgtgttcacatgttcattgcttcacttggtagggctttatggcgctcccaatgtcagccagctgcggtgccaggagctagggtgatgtcaggcccctgctgtcacggagcacacagcccaggtgtggagacagaccccaaggtgaaaaaaaagtaagcaagagtatttcagataataggggctgaggaaatgaaacttaaaatggtcgtgtgggagagtacctggcgtgcaggctgggggaggggattaacagcagaatgtcacctgctaatccaggcccctgtgaaacatcctactggacttgtcatatagtaaggactgaaaagtttgtctgcaaaggccactgagtccgtacaactggaatttagtaataccagttttgcgtcctcacaggccttttgtgatcgctggactccggagcggtagggctgccgtacatttgtgttccggatgcacgaaggtgattgtatttaagatcaccaaagcacttttaaagccgaaacgtcattcgtaattgcactaaattttattcttggaagtttaaaagaaattgacttaaatatattctgcaatccagatgttttaataattcagattagccagattttaggcttaattttacattgttgacaaagcctattgttgatactaccatttctttaaaaaatcgggtgaggaggagaaaagcctggcacaggagcctgaccagggtgccgttgggattcctgtgagccagcgtatgtcaacttttgtatgtttgaaaaggtcgtatgtggcctttggttttgaaacaggtacagagagctgaagtaaacaaagttcacacagccgtgaagtgagggagttgcgatttgaaggcaagtggctgactcctgaggagcctgtgcagttagatacgtacatatatggctgttatgtgctggcgataccccgggtgtgtttagcatttaggagggcagtgtgggcgcagaaaggtcagtagggttgacacccaaggagaaaggagagagtggctgaagtgggagaggtacataggagtccttcactgggccaggtaggcagcggtgtgatggtgaatgtcatggaatctgctctatgtggtagagaaaacctgatctttagcatttgctgattcctgtagtgtaaatactcccactgtggttgatttcacatcaccacttgaggtcactaaaagtggagctggaactattcacaatagcaaagacatggaatcaacccaaatgcccatcaacgatagactggataaagaaaatgtggtacatatacaccatggaatgctatgcagccataaaaagaaatgagactgtgtcctttgcagggacatggatggagctggaagccgttatcctcggcgaactaatgcaggaacagaaaaccaaacgctgcatgttctcacttacaagtgggagccgaacagtgagaacacgtggacacacggaggggaacaacaatactggggcctgttggggatgggttggggggagggagagcattaggaaaaataactaatgcatgctgggcttaatacctaggtgatgggttgataggtgtagcagaccatcatggcacacctttacctatgtaacaaacctgcacatcctgcacatgtaccctgggacttaaaataaaaattaaaatgaaaaaaaaagtgaagctggaaagagaatcaaaatattggctctcctgagcctgcagaggtcagtcccaatataccattgattgtgggccaagataagagtgagcatttaattctaactgtgctgtggctccttcatttatatattcctaaggtataatagacattcaataaaagtttgtggaaggaattatttagttttcttttctttctttctttcttttttttttttttttgagatggagtcttgctctgtcgcccaggctggagtgcagtgatcttgactcactgcaaactctgcctcccgggttcaagcagttctctgcctcagcctcctgagtagctgtgattacaggcgcctgccaccacgcccagctaattttttggtatttttagtagagatggggtttcaccatcttggtcaggctggtcttgaactcctgacctcgtgatccacccgcctcgggctcccaaagtgttgggattacaggtgtgagccactgcgcttggtctatggaattatttatttttcttctactcttctaccatagtcatggaaaatgtctcttagatatggaaaatgtttaccacttttgaaatcctattttgtcccagctgggctaatatttaaaattgattaagaacatgtagaacaatgcaatctttttgatgcaagagagtttgttgagtttgttttgcgtgagatatctgaatcaccagttaataagtggtatgcttcctaaaccttttcagtgccccagtgagcttcctgtaatcacgcccctgtgaaagctgatttctgttttataaacacagagtgactaattctttgctgctgtttgtaaaatgtgatgaaggtgtctctggtttaccatgcccaaggagggctgcagctgctatggttggccatggggagggtctgtccttggtgactgacaggacaaaagcctaattgtgtgggcttacccttattcccagcctcttctctctttatggcaaatctgtgtctaaatccattagagcgtcttgctgcttctccacagtgggctaatctgggtcctgcagaaactatgtgggcatgaagtcttgcctgagggcaagtctggtacactactattcatatattttaaaaacaacgtctctttaaagaattttcccactaaaggatgttatagctgttcatttgggaagataaaaatagtatgggggaaaaatataatggcgaacagatcaactgtaatcttaatgcctcgaaaaaatactgttatactgtcttctagttcttcctggatatattttcttggcagagttataataagtatctcatatgtacaattttgtctgctgcttttttctcgcagcagcatttctcagtggcatctagacattttggaagcatttttaaatgcctgcaaaaatatcctatcctttggattgacccacgtttattattgcctgttccttaaggcctgggcccagaagctgggacagcatcagtcccaccatattcaattggtcaggcagcccaggagccatgattagagggtaggggacatagagcaaactttcccttgggaagaatgtcaaacaaattgggctttaatttacaactaactgaaagagaaaaaaaatgcttacttaggctgggcatggtggctcacgcctgtaatcccagcactttgggaggccgaggtgggtgaatcacgagatcaggagatcgagaccatcctggctaacatgttgaaaccccgtctctactaaaaatacacaaaaaatgagccaggcgtggtggcgggcgcctgtagtcccagctacttgggaggctgaggcaggagaatggtgtgaacccaggaggcggagcttgcagtgagccgagatcacgccactacactccagcctgggcaacagagtgagactccatctcaaaaaaaaaaaaaaagcttacttaattaatatttatagttataaaattttatcagttgttagtggaaaggatatctctggtagtacttgccatctggtgctctcttgtgctcttaaaaaaatgcaggccaggctgggcgtggtggctcatgcctgtaatcccagcattttggggggccgaggcaggtggatcatttgaggtcaggagttcaaaaccagcctgaccaacatggtgaaaccttgtctctactgaaaatacaaaaaaattagctgggcatggtggtacatgcctgtagtcccagatacttgggaggctgaggcagaagaattgcctgaacctgggaggcggaggttgcagtgagccgagatcataccactgcactccagcctaggcaacagagagcaactttgtgtcaaaaataaataaataaataaaaataaaaaaataaataaaaattgcaggccaatgaactctctccctaacagaatgatgcgtagtcgcttgataaatagctcttctacatggaatcactttccagttaattgaaacttgcattttaaagtgtaaacactgaacgattttaaccattttaaccattctgctgggtgactgtgagcatgggttttagaaccatgcaatgctggttttactcctggctgcaaatcccagccttaaccaggtactagctgggtgacctggggtaagctacttaatctctctgaatttcattttgtcatcagcaaaatgggcataataatacctactttataggtttgttttatagattaaatatggtaagccatgttaaatattcactttagtgaatggctcattgttaagtcctcaaaagtagttgttaacaataataaatgtatacataagttatacatttccttaagcaatacaaaataggtcacactgaatggaaacacctcaaaccatctgtggtttacccctagagaaaatcctgattgccagacataatatatagggcaggtccttaacgtgtggtctacccactctctctaggtggtagtctcctctagggggtgtgcaaagttacctggggccccttttcaggagaagctccagctccctaaacagctccggagtgcattcctggttagtctggtctagaggatctgtgggctctttgtggtttgttcagcttgttttgacccttcctaggattgctttaacgcgcgtgaacattgatattatgccatggactgtgccgagtgaaagtatttactctttagggggaaagcaaggatgtctgcccagtgcatcttatagagagatgagtacccacacggagaatttcaggctcaggacatccatatgtcttttgtgcagctggtttgctttagtcttttgagcactctgaatcttctgactggtcctatttccatttctgattgagccatttggaggtttggagctaaaatttcagctctcctctagcaagtgtgtagaaccctctggaatgcactcctgtatggtcttcttccacatgacattattcttcttcttcccttcaggttctttagcctcacagtctctcattcacccattctctcatctctctctttgctctccttgtaccgccacaccagtaaactgccttcttaaaaccatggcacctgctgtctctgaatcccaaattgataaaggcatgcggcaaaacctggatgtagcaatgcattacaattcatctaggtcacaaagcatcctgaggcagaagttgggcaacggtggtgtagggaatgttccagctgtccctgggagaagcccataggctctgtgcatatgtcaagaggacagttgtgttgctccacttcgtatggacaagctcaccctcttattagggagacagaagaaatgacggtcttaaagggaggctcccatggtctttcaggccaggccacaacctctgtcctgcttcagcctcatttttgcagagttggcctgccctaggtgtaattgttatctgctgggtaaataccatggagagtataaaagatgttgctctgtggcccttagttgtgtcagtggggtgcagggaggcattaccagactgcagattctttgctttggaagggaggattgcagttgtgaatgcctgatatgggaacagttgagggaaagggtcgaagcccagaatgttctctcacagtagcagtgatttatgaagggttgctatgtccccaacatgcaagtgtttcactggtgaagcctggcactgccagaggtgggcagacacccacacatgatggtggtggtggtgaatgagtgtcgcatggtaattaccatcaggaatggccgccttgctagccatataaacaaaacaggaggagctgtgcacaaatattactctgactcgaagtgacatcgcctggtgatagtttggttgaattgtaagcaagtgcttcattttgaaaagaaaacaaagccatctattggtgcagaatcttaaaatgatacctctaaaaattataaactctattttacataaggtaagggggttatgaatgtgtttatgtttcttagaaattactagtttctactgcttagaacattctctccaggaatcgcaaattatatggcacatatatgtttctggagtagcttataacattagtggtggataactttccctcaaaagtaactgggatagacactccatgattgaagtaaacgaaatgttaattctaaatacagtcatacgccgcataaggacatggctgcatatgtgacagtggtcccatgaaattatactggagtggaaaagtccctgttgcctggtgatgtcttcatcatcctgtccctgggtaggccaaggctaatgtgtgtgtttgtgtcttagtttttaacaaaaaattttaaaaagtaaaaaaaaaaaatcaaaaattaaaaatagtaaaaagcttataaaacaaagataaaaagaaaaaaattttgtagagctatacaatgtgtgttttagggtaagcgttattacaagagtcaaaaactttaaaaaaatggaaaagtttattaagtaaaaaagttacagtaagctaagagaattattaaagaaaaatttaaagaatttaactcaataagtgtacagggtttgtaaagtctacagtagtgcacagtaatgtcctaggccttcacattcactcattgctcactgactcacccagagaaagttccagtcctacaagctccatccagggtaagtacactatatggatgcaccattgtttttctctttttttgagacagggtctctctgtgttgcccaggctggagtgcagtggcacgatcttggctcactgcagcctcgacctcctgggctcaagtgatcctcctgcctcagccccctgagtagctgcaactacaggcatgcaccaccatgccggctaatctttgtattttttgtagagattgggttttgccatgttgcccaggctggtgttgaactcctgagctcaaacaatccatccgcctcgacttcccaaagtattgggattacaggcgtgagctactgtgcctggccccattttttaaaaatcttttattctgtatttttattgtaccttttctatgtttagatgcacagatacttaccattgtgttaaaattgcctgcagtattcagtacagtagagtgctgtacaggtttgtagcctagaagcaataggttgtaccctatagcctcggtacgtagtagactatcccatccaggtttgtgtaagtacactctgtggtgttcacacaatgacagaatagcctaatgatacatttcttagaacatatccccattggtaaatgatgcatgactgtagtcatagtttctccattccgaaatattgtgaaaacttccttttggaaacatagttgtttgtgctcaggaagactttgagatagacttcattataaaatgaatgcatagagaaattataaacctagaatgaattgacttgcttgctgaaacaagaagagatttgctcaataaactaaggtacaacaaacattggcactgatgataaaggaggtaactgataaccctcttttttgggcataggagaggggaaaattggaagctgttgtgtcccataaggcaagtgttgagggtttgatgacttcattctctcatgccaactcctataaactgcaaatggtgcctggagctctaataggatcatgaggccttgttgggaaatttctggaaagagtgctgtgacacattagtgtggtctgccatgcatggcaatggtggaatgttacatgcctatcccgagatgaggacagagggtgataatctttctctttatttagataaactttcaaagaccttataagtggtcagtgatgttgatgtgaccttgagttttatctgcccccgacccctgttagttaccaatgttgtaaagcttatgaccttggcgactttacccaggaaaatctgaaggttaggtgcctccctgctaaagcccaggttaactgctaggcaggggatattttaagatcagaggaaagcctttgtcattgtaatactttacatgtccaatctgacatagcagctttgccggtagtgtgacaagaaattgtgtgcacttatttcacttattgttagccaaaggacaatttttcatccaacttccgtagaagaacttgtttcatctggaagagaacgggctttggaggctggtggattgaagctggagactgggttctgatcctggtcgcctcttcttagctgtgtctgctttcttatctggaaaatggaggcattttacccacctcgtcagagtgttgtgaggattagagataataataaagctcctaatgtcatgcctagcacttggtgtgtgctcaataaatgggaggttctattagagtagaagctctcttaatagttcctagtagcttgcagaattggtgattttcatcacctttgtatagccatgtgtctgaacctatgacaccctgaactagcagactcctgtgcctgggcccaaatccaccctgcagcctgattttgtatatgaagttttattggatcacagccatgttatttcattttcatattgtctatggctgcctttttgctacagtggcagagttgtatagccaacaaagccaaaaatatctactatctggccctttagtgtctaatggcttctaccatttgagttgtgtgcttgctgagtcagttgtgtttattctcaaatctctttgtgcccgttgtttccattgtaattgcataaaattatgtaaactgatgaaataaggtatcaaaaagagaattgttgtggcagattctgttggttgtttccaaatacccagcttccctttcttttttgggtaatggaattctgagtttcagctgggtggtggccaccagcaattgaactatgtttcctaggctctcttgcaggtaggcatggccatgtttctatgttccagccagtgggaggtgaatggaagttgcacaggcaacttgcaggccatgactttaaagagaaaggggaattatctcagcttctttttaccccttcctgctggtggcaatgtggatggggcaaggtccatggggtggcagtgtgatttgacagtgtctgagcaatgagatggaaagggcctgggtctccaacattatggatgtcccatatcagcctgggacttctatgctctgctgtgacataagggagaaatgaactgctctcttgtttagaccactgttgctttgacatttgatatgataggaaaacctatattgtaatacatataactgtttatgaaaattaagtcaaatgcattggagagagtaagagtaagttgctaatactacttttttttttaagtgtggacaaaactaaaaaggtttggggggatgagcagaaaaatttagaatgatcctttacttgggtttgacttctgtcattaaatccttgctccttttttaaataaataaaactagaaatcatgcctaatacatcaatttatttgaagccctaaatcaattggcaatttgataaccccctcagtccccgcacctaagtgaagatttattggattgaatcgaataccacaggggtggactgctaggtttgttagtccccagtcagcactcaacttataccctgagtctaagaatattcatactcatctattttttttttttgagacagagtctcgctctgtcgcccaggctggagtgcagtggtgcaatctcggctcactgcaagctctgcctcctgggttcatgccattctcctgcctcagcctcccgagtagctgggactacaggcacctgccaccatgcctggccaattttttgtatttttagtaggggtggggttaacaccacatggaagccaccaaggcttatggcttgcaccctctgaagcagcagcccgagctgtaccttggcctctttgagccatagctggagctggagtgactgggacatagggagcagtgtcccaaggctgttcagggaagaggtggcctgggcctggctcacaaaaaccattatgtcatcctaggcctctgggcctgtgatgggaggggttgctagatggtctctgaaatgcctttgacaatggggcttttcattgacttggctatttgcacttggctcctttttacttatgcaaatatctgcaacctgcttgaattcctcccctaaaaatgggcttttcttttctaccacatggccaggctgcaaatttttcaaacttttatggtctgttttccttttaaatgtaagttcaagtttcacatcatttctttgctcacacatataagcataggtttttagaagcagccaggctacatcttgaacaccttgctgcttagaaatttcttccaccagatacctaaatcatcactctttaagttcagagtttcacagggcaggggcacaatgcagccagttgccttgcttaagacatagtaaaagtgacctttgctccagttcccaataagatactcatttccttctgagacctcatcagcctagtcttcattttccatattactaccagcattttggtcaccaccattcaagtctctaggatgttccaaattttccttcatccatctgtcttcttttgagctctccaaactcttccaacttctgcctattacccagtctcaaagctgcttccacatttttatttatctttacagcaatgcccccactcttcagtaccaattttctctattagtctgttcttgcactgctataaagaaataccagagactgggtaatctataaggaaaagagttttaattggctcatggttctgcaggctctacaggaagcaaagtggcttctgcttccggggaggcctaaggaagctgccaatcatggcagaaggcaaagaagaagcaaggcacatcttacatggccagagcaggagtaagagagagcaggggggcggtgccacacgttctttaaacaaccatatctcttgagaactcactcaccatcatgagcacagcaccaaggggatggtgctaaaccattcatgagagtctgcccccgattcaaccacctcccatcaggccccacctccaacacttgggactacaatttgacatgagatttggtggggacacagattcaaaccatgtcattaactttctaccattttttttgtgtcatctataatcccaggttcatacccatacccatcttccctgcatactgttgttgaatattatatttattaatttaccattaatacatgtactatttacataatagcttattctcaaaatctgctattgagggagactgagggcaagtttagcaagcattgtcatttttttctgtgactgataagggtctgattctcttagtaagagtgtattcctttaaaagcctctgattatttatgtgaacataaatgagagatacactctttaaaggactaagttgggaatatgacctaattaaacagcctagcatcttgactgaatatcttaatgtgcgatagtcactccaagtttgccatcttccaggttattgctttttattacaaaggctgattctacaaacaaaaataatttgaattggccttcataataaaagcactttggagaaacttgagaattcagtgtttgagttgtatatacctggtgctcaggaccagtgtggtgggtaccatctctaaaaagcaaaattaggaacaatattgttaatgacttttttttttgtgctgtaggaaacatattttttagtatcctcacaggtttcatataagtaggccaaatgttgcaatgcagggaagggacatttacttttgactccaactacagtaaaccctgggttgaaattcatcagaaattgtggatcttcagtggaatgcaagaaaagacttatatctaaatgagccagcctgcttcacaataacagttttgttttccttgaggagtgtttcttgactatctgatattatctgtccttcagggataaagtagaaatattttctgccctcagggacagtgattgaagcaaatcttggcattcacaaatgaaagggtgttgaatctcctgcaggtctcaagtaggtgcttgtcctatgctagtaatggaatttgcattactcatgccctgggcttatgaaagtctagttattaaaatgttaaaattaaaaacgctgaaaaatgacttatacttggcatcttgttcatagaaacttgaaactgtaataaatactatgatgggtagttgagtgtcagcctcccaaatgatctaggtggattggataattgatgatcacctggagaagtagcagtgctcagtttgagataggaggtggaaagggtcaatcgcaaaagtaagtagctgatctctgagtcgttttaaacttgatataaaaaaagggagagccccaaatagaacactaagttgctctgaggaagatggggctctccgggcagaaagcttctccaggcagaaaaagccagcactcactggcgccttctggtccctggccttgggaggagtcgctcacgtggctaattggcctgagaaagtgaacgcttcaagttgagtgcgatgtaatttcttaatcttgtgtttactctttttaatcctctagttgacaaatcttatttgcgttgtcatggttctaattcagtgagtgctcatgcagagaaatatatctgtttttattttgtttctctgcctacatacagtcatatgcaagcacctacacacagaggaacataataagtatccacaggattaaaaaaaattctaacacattacactaagaaatgttaaaatctgtaaccagatactgactgacctttctaagaaaaattcgacaggaattagcatcaacagatgtccactaccagtagagagcatgagacccttagtcactagctgagaatgaaaggtctccaagccaaagcatatttataggtgtgatggttgcagcagctgtttgtcatggttgccaggtgacgagttataacaaatcctttttttttttttttaagtttgtcaatatggaatggtgacttagcaaactttctgaaaaatattgtttggcttcaacttccatttcttataaattgaaaataaaataatgagtagtgtgaaataatgtatactttctggaggtattataacagaaatcaaaacatctttggaaatgattattgcactataaattcataaggatgtgaaaaagttaaaacctaacaagaatggtgtgtgtgtgtgtgtgtgtgtgagagagagagagagagagagagagagagaggacaacactgtctgaaaatgttctccagcggggtgcagttgccctacaaaaacttgaaaagcaaaaccaaaaagggagtcatttttctctgatatttcatgtgaaggttggatattcgtcagggcccagttctgttctctactggtatcacaaatgctggtgggccatgtgggaacagtgcccgcaggagatactcatggatccagggatccccaagtcacacattaaggctcaagttttgcccgcagaaatctcatatgaaataccgattttcagttccagaaagtcttggaatatatgaagcatctttctttctttcttcctttctttcctttctttcgtagagacagggtcttgccatgttgtctaggctggtcatgaactctggggatcaagggatactcccgcctttgtctcccaaagtgctgggattacaggtgtgagccactgtgcctggcccgtatttcctaattagctaattttgaaggcattttaactgcccatttgcaagaaagaacaaaacaaaactcttccctatagatgacagttgttttctagatttttaataggactttttgtctattattttgtatatttttatacatatgagggaatgcatgctaattattaccaacacgtaatgtatagaaacattcggataagtgaattaaaaacatggtgccaccaaataaccactgttaattatttttgatattttcttctttggatgtttactgtttatattcattcagtatttttatgtgcctcatagatgtcaagctctgttagctactgaagacagagcactgtccaagaattccttcatgggatttaaagtctcatagggagtcagtgttacaaatgtcataaattaattgcaattcatagttgccctgaaagaacgttaccagatgcgacggtcgtggtcggtaaccaggagatctgctgtgtttcaagcccttttcagcctcagttttctcttgggtaaaatggagataaccctgccttgcagggtatcgtaatgggatggggtcctagggggatcatgtggaggacattgggacagtgcgggcagagtgcttaacatagtgcctggcacacagggagagcttagcagatagttgccatggtcatggttattatgggcacgtgttgtaattgaagtttgtgaagttgggttcatgattatggaatcactttgtgggtactaatttaggaacagctggaggggttcagagagaaaataagaatctagatgccttaggaccaaggagtttcacctgggaaccaaagccgctttttaactattttgatttctatttgtgtagcttggcatttagggatccataatcctgcctgtggcactgccctaatgtgcttccctactcatctttgcaatggtccccatgttccaatccggagagtgttttttctgtatctcgccccacattaggagcattcccagttctatgcattacttccctattccattgtggattcattctgtgaccttgaacaagatagctaatgtatctgggcctcaactttctcaatctgttgaacaggaataataaacagtagttcactcacaggttggttgtaaggattgaagtaagtagtaagtttataagatagtaagtttataagatgctgttcactacctgacccctggtgagtgttagctattcttttttatggtgcctgtaaccccctttatttgaattgttaacaaactgcctttgcttgatttattatataacctaattgcatctttcctttctactacaaattgccacctaaataaaactgtcatagtaatctgtgtaatcttataactcttttttaatagttacgtttattcataatttaagatattttaaacaattttccattgctcccactgaaacatgggacactttattttgttttacaaatgccagaaaccagcttaaggcacaagggaactggctccaattatgggggatgtccatgggtggatttgctttgcaccttgccttttgggcccaacaggacccaagaactcaaacctgactatcaggattcattcatattctctccctgcctcccatatactttctccctccctctctttttccatctactccaggtttcctatctctggttggtaattatctcctcaaatctaaagctcaagaaatatgtgaaaatattttagctttgatatattaaaaatataattttttgctttcaaaaataactgagttgtaaaaacacttttaagttcattagtatatgctaaaacattgtcctgtaaaatgtacaatagtgaaaagatcttacatttaacaagctctcctcatatatccaatccccaacatagttttcaaattcatgtatctccaatagccctagatacaattaaatgccattttttaaaggtgagtttcatgtatcaccagtgtgtgtaggctttgcatcattcttgggtcacatgtacactttaacttattggttacaggctgtgccttagtcaaccctcagtcccagagccaggaatggtgacagttaatgtacattcactgcatatttattaaaacgaacagaagttaaatgataatgagatagtatttcttctatgccaagattcattttgttgcagcattattttttctagtgctcaaagatactattggtgaaagggatgaaacaggctgctagcacatgttctgtcttacagaattacaatctatttttaaagagcacaagagtgtcctatttcttagtcttacagaaccccctaatggagaatactgtgtgctgcattctgaaactgccagccaagtgcattagaaattccattatgcaggcattaaactacacaaagacaaatcttataatatttaaacattgttttgataactatattttttaagggaacaaaggtacatgataatttaaaagatacacataaaagtaaaataagtgaactgcttcacatcccagtttgactgagttattttgttcataacaaaactcaccactttgtatcctacagttggcggttgaatcacttaaaatcagtttgatccttttaaggtctgctttttttttttttttttttttttttttttttttgagacagaatctcgctctgttgcccaggctggagtgcagtggcgctatctcggctcattgcagcccctgcctcctgggttcaagtgattctcctgcctcagcctcctgagtagctgggactacaggcgcatgccaccaggcctggctaatttttgtacttttagtagcgatggggtttcaccgtgttgggcaagatggtctcgatctcctgatctcatgatctgcccacctcggcctcccaaagtgctgggattataggcgtgagccaccacgcccggcctaaggtctgcttttaagacttgttaggaccagagccgcatttagtttaggactgattattctctgctactgaggcaagacccttctgagtattctacccatgtctgtgaattttgaagtttttcggtctagttggtgggactaggtgtcattcttggccaaagacactgttccttctagtcctttctgatggctctttcctggcctccgggctcctcacacgcctgtgccagcaaagcctcagctgaagactccaggaatcccccacatcagacctctccctttatctccctctgtactgtgctctactctctggcactgggtcctgcaaactctggccccttggatctcctttttggaccctcagcaatgtctcctcaactcagggagttgccaggtggtacctgggttgctgcccctgctcccaggccaggaaacactcaaggcagcgagctgggtgatcacataactcccttattggtttctcatcccttaggagtcactgtccttccttgcctaatgcccagagttttgaaaatcgttgttgcatagattttctttgtttcaggtgggttgggtatatcagctccctctcacaccgtcttgcccagaagcagaagtctccctcctctttatttgtaggacaggaattcagtgttactttatcaagggtatttctcacagtgactcttaaggtaagacacacctgcctcagcatcatctaggacacctgttaaaatgcagatttctgagcctcacccaggcctgctccatctccatctcttcagtaaggcccacacagctgctgcttaaacagtgccctgggtgtctcacaactacagctgcaggaactgcatgaagggcttatttggccagacctcccaatgtatatggtaaattgtattctaatagggacagggaggaagaaagaagggatgttggtttgaaattctactgagaagccaaagctcctttctgtggacaaagtgagtttgcttatctaaggagccatctttccatgttttattcccttagagtttcactggcaggtaaaaccagaaattcttcagctgctgaaaaaggactttgccctggcttaggcttctttgataaagaattgcttgattggagaatggccttcatcaaaacacctgactagtttttccgtaagaaggaaaacttaaccagatggcatctgctggggcttttttgggagtcatttacagttacagatccttgagcaaagcccatttgatagatggcatggccatgtagaggctggggcttgtagtgacttctccctgggaactacttgaactggactggctacgaggatggaaagttggggatgatggtcatcgggggtgactcttaaatggtctttatcttgtggctggagtgtgtggtgagttcactccttagtgaaggcaagagtgtgagagaaagctggaaggctggcgagagggaggggagatggatagaaagatgaaccaaagaacctatttccttttgaacttggaaagtgcatggtctctctgaaactaaggaggaaatattaataaagctactggtaatgaattttctcccttagttgagcgtcagtcacagaagacttgtattgtttgtttaggaacttagtacaaactcaaaatgttttgaagccttaggtattttcatttccttttatgttagttgggccttatgttgcatggtgatcagtgccaaggatggtgggaagacagctacacaccatggaaaagatctgttccccaagccttgcccagcattcacaggagatcttttttctagttatgtgttttccaaataaggctctctgggaaaacctagagtttcattacgtagcaactcagcgtgtgtatgtgtgtgtgtgcagatgacacctgtgttaaacatcaaccaaccactaagcgtagatcttggtttctgctgagtatttggattctgcacatgaagtgctctgttttcctggaaagggttggtcctgcatgatggcacgttggtattggtcaatcacacctcatctcttctggttctaggaaggagtgaggaacatgaaatgctccttctcattctgaattgccatgtggtctcttcaaagaatatcattgaatgtattcaccctttgaagagggcacacattttaaaggatcagaactgtattggaaacccagagtcctggccttgggtcttggctctgcctcatactagctgcaaaaagttggatttcacgttcctcacctataaaataagggaatttgaaaagttgacatcaaatgtcccgtctcatgacaaattatctaattctgtataacctaaattgaactgtggtgacataaattaatggtaaactcactggaagactatagaaatgtgagttcctatggtactcagaattaatcactgggcaatttaaaactattgttaaactcccagggagcacctgtttttggtccagaagaaaagatgtggagtgacatctttttttcaccctggaacttacattttctttttaaatcatatatatttcgattaaattttattcagcccaatctgaacatttatttttaatctcaaacacttattactctttacaaacccatttggttagatattattttcaggttgtacacaatgaatttctcatttctgtttgtgattataacaattcaaatatcaattataatttattgtgttaataaaaatgtaagtaatgatgaaatttattgtcccaaaaaactattatatgaagctttttaaaagggaaaaatgtaatataattaagagtgttttcttatgactatggaagatagtcaaagattgcatatttttttctttctttccagcaaatagtgtttatctatagacacagaggaatagtgctaccagcattcaagtttttgataacagtattttccacatttagtgtgatgcaagacacaaagggggaacttaataactttttattgaataaatgaataaattagtggatagatggtgtccacttgaagtcccctgtggaaaatagataagacccttccttaaatgctaaagagagtttttagttatttcatagtaatctctataaaacactttaagttatatgaagtctttgttctaacattatctctatagtgacaatttagtattatactaggctcttttacaatttggggacatttacttaagcagtaataaaaaatatgtaaacaaatatggatatggtgtcatttccaagacatgaatcctaaagatgatattagaacaaagttccagcatctgtacaaagtactattcattcaaaaaaatatttttttgtcctcgcgcagtggttcatgcctgtaatcccagcactttggaaggccaaggtgggaggattgtttgaggccaggagttatgaactgttcatttattccatcttaatgtttaaaagaaaataacaaatccttccattatagcttttcattgatttttgttagaattatattgggcaaacagttcaaatgcatccttaaataattattcaatatgcatagagagcagaaattaaaatgttttctgtcatcttcatggtcccattaaactgaacagtagcttagcctgtctgtgccaatttgcagcaaatctatattattctgagaaaacagactgcattttaataaccttatatttcctttgccatatagcttttgctctctggtgcaaaatcttttcccactaagcagatatctgtggcaagattttgccacagatatctgcttcttagctatgcacttagtattttaatagatgtggaatcatggggtatgcaaacctggtgccagatatggtcctgctgaaaacagatttgctcagtgattcaagagtgggtagagttaatggatgcataaaccatccccaaaagttcatttcttctgacagacaggaaatctacctgcaggaataacatcagcctggacaactggtagctcagtgactctccagagcattagttgaggctgaaagaacaaagaggaaggaaaatggtatacttccccccttttaaaatatgctattgcactcatttaaacttggattaaaattatttttataaaaaggaattgtaatttacaaattgccttactattcaaaatatattaaaagtcacagaatctgtatgtacataaacttctgtatagttgagcatctaagggcaaaggtagttttgatttgtcttagggctactggaattgaatccagagatcagcctcaccctggtaccctaccacagctcagatgatagttcactaacaattctagtcttcttctagaaactttgctgcttttgttattgccatatccatagctctgtggcagtgccttcaacatggtagacacatatctctcaataatctcttaaatgaatgaatttgaggattcttaacagggcttgtttgaactggtatgtttttatgagttaggattgcaagagcaggaattaagctttatgtcattgtaatgttagggaatgacatgtatttacatgtgtcttcttcctggagtgattgtttctagtttttagctcactgaggttcctgtggaaaatgagggcagggagaaagctggttgccggcccatgcatcacactcaacacattctagatgatgattaggaaaatgtactctggaaaaatagaggatattgtaagatctttttaacaattttctatagagttttccaaccatggtatatattgaaaatacattgttggtatttattcttaatattgtatgcttaattccaaggtttctctaaaagtactgtggtttcccaatccttaaggtttaagacgtttctaacaagtcttccatgacctagtctcctcctacccctccagcttcacatgtttttcttctggttgactttgctggagtcacattgagactcaataggatagcacatttaagctccttcccactccagggcttctgcatatattgcatgttgttctacctggaaccctatgattaacctgctgatccatcccatatctgagttttaaaatgactcttcattaaagatgtccctaagcctcaccctgttctccctgagtgtttccctgattgtaaacagacaattaattagacagctaattgtttcttttgacatgtgagtttcctgaagcaggtgtctggatagttcccttctgaattcacagggcttttccagagggtgtggccaacagtagatgctcaataaatatttgccaaagccataaatgttgaatgaatcatccaaagttcagtagtattttttttctttttgtctctttagctgggaagttatcaattccaaaccagatgaaagacccaggctcagccactgtattgcagaatcatggatgaatttcagcatatttcttcaagaaatgtctctttttaaacagcagagccctggcaaggcaagttttccagtaaaggagtatgttttaaaatgttcagttacttggaaacaaatgaactaacctattttatcagcttgtcagatttctccaattttaaatataatatactaagaacatatgccataaaagctggtatcagcaaggttcagatgtgtgagtgtgcgaacactagataatcctcagcctcacattgtgaaattggattggttttacattttatatatatttatctagctcattagctaaaatgaatggtgattggtcttatcagcaagactagggagaaaacagtcttaagaatttcagttatcgtatttagcctggtgctgaagtcaaagggagatgaaatgaatacatagttctttgactgtgcttttggagataactgaatcttattttcaagctaaaaagtggagattcttgtatgatttacttatttaagaaagaaaacttttggcaaaaacattcatagtgattatataaacaaaatgagtatttttccaattaagataaaacccatgagggggaagtgtcttacatggttgggaagggattacatggagtgctgcacatacttgtattattttatgcataaaggcagctttaattctgatcaactgtcttgatagcttgggtgaggtgcagaaccatcaatagaccttgtctattccagtgttgctttcaagctccttgaatatccacccgtggatagaatgaagagctaggaatgtcagcattgaaaatctctgtctttgtaccttgtataggcaatatcgtaacttcaatagtattaaataatagaactatgcttggagacattttgagtgtattaaagtggcagtattgcatttggatgcattttttttattcattgaaggcatttttttttttttagcatagatacctatatttggggcatgatgtgctgttgatgttgattttactgaagtgattaaatgtatttttggaagattctaaacttcaaacttctgcattgggttgcattaatgtgccccaagtcaattagcttaaaatgatgatgctacaaatgtagggcatattatgaaatccctttgtaaaactaaattctggatatagtaatgcttttcttggcttatttgttcctttgacttttatggcctttccatttcatttatagaattccagattctttcaagggcccttgctgttttagaaacagctcttaattttgttccacaagtcatctaatctacttttgactagttaatttattaactctgtaccgaagaatgaaaaatcaaaattaaacttagatttagacccctttgctctttatcatcatcagttattggtcagaggtatgtattccttcctcctgtatcttttagaaactcccttaatgaatttcctttgcttgcttatcagtttaatttactatcactgtttaaagatgacgaaaaatgtaagacagtttaagactggagggtgaaaaatcaggtgaagactttatggtaacatttttctgccttgatgtttctaaagggaattaaggatattttctgatgtttttaaatttcttaaaacaatcaagattttttaaccataaatgacagaaggaaaataaacatgtcactgtaggagtttcatttcaatggcagtttttttctaggtgacttagaagtggggtcagtttgagcagtatatatggttaggaaagaggatagtgatggccataaatttatcctgtcagcttagcagctataaattacattagatttgtgtaaattacgttagatttgtgtagatacctctaatttctgtaacttgttttgctgtgtttttatgaatttcagtgggcttatagtggtagtttgaactttcagatgtagttatcaggccgcattaatttccttaaatgagcgaagtaaaagaagtttctgggaacataatagttttctgttctcttgcacctggcagtaatatagccacaggcatgagtaatgggagttgtcactctctgtgccagaaattagctcctgtgtcctcaaaataattattaccaagtgttgaaatggactaagactggttgaatgcagcagtcattagtcagcccttagtgcaaaataatgctctttggaaaaaatctgtaataaccagataggtcacttataccggtcactatagatttacaattgtgtgtgtatcctgtgctccgaaatatcttggtgttatgcttaactatcccatgttatttctattatttccagttttgtctcctggtctgtagtgtgtgcacattttttacgatcttgggaagttacattcctggggttatactcagctatctactgtgtaagtatagtagaacatatggctaagtgttgtgatgcatatggtatcaccttacggtcaacagacctgtagtttgaagaggggggatgagttcttaactataatacaagttgattattctttaatctcctgctgtacaaagtttctccattttcctagagacatgtctctattttaaaattggaagaatagctgcaaaaggcagaattataagtgaataattttatgttaaattttgtcagtaaaagtatacataaagctgtatgccccacctcccaaaaacacaccaacacctttgccttcgtgcgtgttctttggctcaaaaaaataattaaaaccacaatgaaataccattgcatccctaccagaatggctaaaattaaaaatactgaccacatcaagtattaggagggatgcagagcaagtggaattctcacatactgttgcggggtaggtagaatgttaaaatcactttggataacagtttggcagtttcttaaaaactactacatgacaaagctatcccacaactaggtacttacccaaaagaaatgaaagtacaaagacataaatgttcataacagatttatatgtagtagccaaaagcagaatataatccatacatccatcaattggaggaatgggtaagcaaactgtggtatatccatataatggattactacttagcactaaaaatggatacatacaacactaaagataaatctcaaaataattagactgagtagacaaaaccagatgaaaaagtgtgattccatttatatattattccagaaaattcaaacaatctttagtgacaaagcaggtcagtggttgcctggggatgaggtgggtgggggcagggagaagaggcaggagactggaaggaaggttgaataaaaccatgagaaaacttcatgtctactggtagacatgttcactatcttgattatggtgatggcttcttagttgtatgcatatgtcaaaatttatcaaattgtacactttaaatacatgtattttattatacatcaatgaccacccaaaaatgttattaaaaagtatggattttcttcacctgaaaactatgatctggcactgctacctttcgatggggcaggcactctccacttaacatacccccatattttccaatttttcttacaatggactttaaaatttacatacaatttcttggcctctagagacatttgagtttgtagctcttattttaaaatataatacgggacacttcctaaaacgaacaaagaaataaatattgggaatacaatacttagagtgtggcaatctttgcttctttttgtattcttaatgcataatgcaaatggcaaatggtcagagctcaaatccattctccccaaaagaagtcatatataacatcagcctcatgatgacattgtttaggaggtaaaggagaagaggactggggaatgaaagaataatttgggcaaggcattattcagatggtttgcattgatttcatttatgcttcacaacaaccccaagaaataatgttactatcctaatattattgatgagaggctaataactttcccatggtgaaatggcattgaataaacacagttaaaccaggactgttgtctggaaggcatgtaatttttctataaattttgagaataaaaggattgaaaggagggagttgatctaactgcacctggaaacaatgactgtgagcattgtgtaagtgtgggtatgcatgtgtgtgtttgtgggtggtggtagaaaatgtttaccttacagaaaaagaatagaaattataaacttgtgtaagtgtgggatgcatgtgtgtgtttgtgggtggtggcagaaaatgtttaccttacagaaaaagaatagaaattataaacttatttcacaatggcatttcccttaaaaaaacttaagtttttcagtaaagaaatgtagtattttgtgaaatactgaaatgtacgtagccttttgaaaggaaaggcattttacctctgctctctttcttctttcagtactgtgtgcatttttgtgtccattgtttaaatgtaatgatattggacaaaaaatttacagcaaaattaagtcagttctgctgaaactggattttggaattggagaatatattaatcagaagaaacgtgagagatctggtaggtaaagtttatattttagattctatgcatgaaatgagacattagcgagctatttttaggaaattctttaatacatttgaggatacttttagctttttactaaatattattatagaagctaatctccctcaaagttatatatatccttttcctatttgggctttccttcttttctcaaatatacaattaaataaattgactttttaatccacagtgtcaggggagaaagaaaaggcttcaacactctttattgtgctacttatgatttacttagttttattttgggttggactatcacaaagaaaaagaaaatacaggaaaagccaatataatcatctcttactttttaacttggcttatgaccttataggttctcaaactagaatgtatcggagtcacgtggagggcttattaaaggacagattgctaggccccagcccagagtttctgattcagtaggtctagggtagggcctgagaatctgcatttctaaaaagttcccagggaggatgcttttgctgtttcagggacaatattaagagagccactaatgtggatcatttcctttgcaaatatgtgaagcttgttatgtgcaaacatttaattatatttgtagttaagaatatgagaaatatatatttgtatttggagaatatgagaaatgtggggtaagaatacataatgaaataaatgcactatgtctgagttggctaggaaactgaaagcttccaaattttttcctcaacagaagcagacaaagaaaaaagtcacaaagatgacagtgaattagacttttcagctctttgtcctaaggtattttttgtttagttttcaatttgttcctgtgtggtttgactgtaaatgcatgtatgcatacaaagctgaatgatcttcctaataaactcctcatatttctgtaagatgactgaatgatttcaaaataaaaatatccatttggtttttattactctgtcattttgggggttcatatggatttttcaaaatattcccttcagcagtttaaaatgtgccgctggtatttatttatattaacacagattagcctcacggttgctgccaaagagttatctgtgtctgacacagacgtctcagaggtatcctggactgataatgggaccttcaacctttcagaaggatacactccacagacagacacttctgatggtatgctaatatttctggagacatttatttttatgagtgcatacaaaactattgaacttctgtcaaatactgaatgggtaaataacatgttaccaccatatctacacagtagaatattacttggctataaaaatgaagtcctgatacttgctacaacatggatgaaccttgaaaacatgctaagaagccagacacaaaatgccacatactgtgtaattccatttatatgaaatgcctagaataagcaggtccatataaagggaaattaagttagtggctgctatggactgatggagggaatagtgagtgactgttaattggtatgcatttctttttggagtgatgaaagtgtcctagaattagatagtgatgctgcttgtacagctttatgaatatactaaaaaacactgaattgtataccttagaagggtgtttttttggtgcatgaattatcaaaagctgttttttaaaaagtatgaggaaaataaatcagtcaatgtccaaatttgcctttattttgaaaacaaaataatcaaaaattagaaaaattacctcctgaaatgtctttgaaatgtcccaagcgataatgtgggagagaaagatagacgctaatcctacacatttaggcctagtcctcattaaaaggggctgaagtatggacgtcaagttccctgagtccaaagctgactccggagtttctcacatttgtcttcaaagttaaaaaagctttttatttttattttttttgtttctgacttttaagttcaggggtacatgtgcaggatgtgcaagtctgttacataggtcaacatgtgccatggtggtttgcatcccatcacctaggtattaagcccagcatcgattagctatttttcttgatgctctccctcctcccacccccaaccctattgacaggccccagtgtgtgctgttccccaccattgtgtctatgtgttctcattattcagcttccacttacaggtgagaacaggcagtgtgtttggttttctgttcctgtgttagtttgccgaggataatggcttccagctccatccatgtccttgcaaaggacatgatctcgttcctttttatggctgcatagtattccatggtgtatgtgtaccacattttctttatccagtatattctttgtttataataagtacaattaaaaacaggaaagcacagtattctttataatgcaaattatgtccaaaacttaaattgagagtcaatgcttgtacagtaacttaacttttgttagtctcactggattaccttgttttggccatatactgaacatatgagcagattataaaggaggagggtgaatgaactattttacacttatgttccaaaaggacattttctgtttttaaaggaaggagggagggaggctgtgcagtgtttgaaagaagatgggtttggaaggtggaagacccaagtggagtcttgcctttgtcactacctaactttatgaccttgaacgggtgacataatttttgtggatctcaatttcctcacctttaaattagaacaggagcattgctgaaggtcattcaagctctacaagctttcagtacctacaatttgaggtcatattttaaagaacaagaataacaagtaccttgttcttaagcatcccatctcagattcaacaaaagagacaataataatccaagccacatacaaggcttttcattaattgaagatttcaaatcactgttgcagggagttaactgttatattaaaagattttatatgaaaggtaaaaacaataaaatctattagccttctaatgtgacattgctttcaaatgtcctaaatcttggtatggtcagtttcagctatagttatagagagccaaatgtttccataaactcttgggttatatggaatagaaggagcagtatcttcctttcattgcttaaaacaaacacagattacaggcactgaaatagatctctatgtatgaaaatgctgaggctggataatattaaccaaaacccaaggaaacttattatagtattttaaatttcatgtacatgtgtactcattggcttaagataattcccaccctaggcgcaggatggggaatttttatagtaaatgcttaaactttagtcaaaacctcaagctaatatcagacaaaggtgaatgttaagtcagtaaatacactgttttgtgcttaagaggaaagctaaatatggagagggatgtgtagtatttgtgtccctgtggagaaagagtgttgcaggattaggaggagttcagtatgtggttaaattgattcaagttgacccaggaggctagatgaatgccaaggttgccagagggttcagattaaagtcagatatctttagacagcacttttatttgaaatttgttatggtgcttcagtctgaacttctgttatccatttcacagatcttgaccgacccagtgaggaagttttctctagagatctttcagattttccatctctagaaaatggcatgggaacaaatgatgaagatgaattaagccttggtttgcccactgagctcaagagaaagaaggaacagttggacagtggtcacagaccaagcaaagagacgcaatcagcagctggtctcacccttcctctgaacagtgaccaaacctttcacctgatgagcaacctggctggggatgttatcacagctgcagtgactgcagctatcaaagaccagttagagggtgtgcagcaagcactttctcaggctgcccccatcccagaagaggacacagacactgaagaaggtgatgactttgaactacttgaccagtcagagctggatcaaattgagagtgaattgggacttacacaagaccaggaagcagaagcacagcaaaataagaagtcttcaggtttcctttcaaatctgctgggaggccattaatctaggaatcagcttgcaacagagcacaaaaaacaccaaaaaaatttcaaacaagaaaaaaaaaaaaaaaaggaaaagaaaaaaattgaactgtaagctttaatgattactttagatttgttttattttccctcctgcagtgaattaattggatatatatcagctgacactgatagattgatatttctgatcgttatttttgtgtaataagcatggaaatgaactttatacacaccactgtgttgtcagagataaatattaggggttgtttttaaagcaaaaagaaaaaaacaaaaaccaaactattaaaatcctcctataaatattctttttctttacagtttttcaagcatgcaaaacagtttattgtaacttactgaaaaatattaacaattaattgtgaatacatgctgttaccagcttccttattcctaatacctggaaaatttttttttcaacggatagattttgatgtaaaaaagaccgaaattatcaaggtatcttagttgaaggacttgggaaatactatcaaaattaatttcttaggaaaaaatttaaaagtatatttaagtactctggatagactgaaacgtttccatgttatttctgcagttgtagacttaggcttatttgtaaagaagcatgctccattgactgccatctctagtcttgcagtgggtggtattaacccatagaaagcaagcagttgtgtatcacatagacaatggttatgatgtaaacagattcagttgttttgttgttcattcgtcatatgtttgtgatagggatgttgggagcacagctctattctgcctgctcagacttaagttagacccttatcttttatattatgtcatgaaaaaagtctcctaaaattgtgaaactagttcttgatgagtgatgtgatcatcagcaataaagatataataactctgttttcttagcctgtatagaggagaggaacttgcttggctttaaaatatatttatttgccatttaagtataaatatggaatctgtttcttattgggaagatagaatatatatattttcctttaaactttttaaggtcacttttaaataaccaaatttgatttatggtttttaacaaaggactaaagagctgaaaccaacctagttttgtttttgtgatataaactttaagtgtcgagggaccatgccagcaactaccaaaaatctcttaaatcttcaggtacagctggcattttggcagatgcatagagacatctgagaccctcagaaaggaaggataatccaagaatataggaaatctgtgttctcttcctttcattttatcccttatatttctaaagactaattataagtaatctgacattttaatgtagctactcttatttattttttctttctgaggtattaaaatatctggactgagttttgccaaatgttaaagggagaagagttactgaagactttgaacacttgctttttgtgattgcttatgtcattagtgcctcatgactgtgtttgatgtcctttattgatacaaagtgagcctgtgccttcattatcttgcccattttaatacaaatggaaacctggtgtttgaaaatctctgaactgtgtgggttttggaggaatatacctgaattttattcaataacagtttctggacaggaagaaaaatacagttacatatttataaaatagtcgttatcagta

SEQ ID NO: 396 - DNA, 25101 bp, Homo sapiens
acatagcaaagcagctcagagttggatctaggggaaagcgctggaatccacgctccgcttccccacgcagcctcgcctgtggccccagcagcgccctctgcacatgggaggtcgggcagcttagcggagctccccggccagggactcaggcctcaccaggggcccgcgtgtccagcctgacgtgggccatctgaatcgaaatacacccatcttgctcaagacgaggcctagagagtcagtcactttaacgacaggtgaccttgggtgagttattcaacctccaagaacttatctgtcaagtgagggtgagaaggatccccacctcatgggctgagatgaggattcaatgagataaaggctgggcttggtgtctggcaggacagcgctaataaccagaggttgctgtggtgttgattataactgttagggaaactgaggcctggagaggttaactggaaagacaggacccagcaccggaagtgggtcaggctccactctgggagggttcagggtccttgttccccagggcaccgctggctccagacctggttcccaaacctaattgatcatctgcctttttaaattaagggaaatagagaggaaactagcatttattgagttctgtttccaaccttattacccttgactcctcaaaatgctttttctatctgaaaaccagacctgtgcttaactgtacaacccactgttactagtcacctcattttctccaccagaaatgccttctccttgtcttttctgcctctctgaatgtgacagaccctcatctcccaccccaaagcttggaatcagaatctctggaggttccactggagatgctgaccctcagctgggtgtggggccactgcctgtggagcttgatgaatccttgttaaattgaattgagctggttgtggcctgcagccaacattcctaggtgtccaaagagatagaccagaaagaaggtgaagaggaaacactgtaattaccagtcaatatatatttatttagatcatgggcacataaaatgcaaattattcatggaccaggaccccctatgttagggtgtcaatatcccgacacattcagggccagccctgggaaatggagttccaggcaaagagaagcctcagggcattgtggaggtaaggctggtggggaggatagagagagaagctggacttcctataaacttgaacttcctctgctgtgtaaaaattcagtggggtgaggtgcaaaaagcacctgcctcaacccgccctgcttgcatgcacacattcattcatttatttcaatcctcacctattgagtgtccactgtgggccagaccgggtgctacgcatacaatcagacctgatcactttattccccactggagttcctggtctggtggaggaaatcaggatacaaagaagtgattgcaaattccatatgacaagttaataaatggtggcagtgaggagcactgggagaagggaggaggtgttcaggaagacttggcagagaatgtcaggttggacatgggttagaaaagatgaggggagttttccagctggagaagtgttaaaggaccagggtgctgaggagtggcaccctgggtgatgggcactgcttgtgcccaggtagggtggcgggaaccagtgcccagtgttggtaaagtccttcatatgatggagtgaagagtgagtgtgtgctgggtgtgtgtgtgactggacaacaggtgagtctgaacaatgaagatgctggacttggcacagtggaaggcagctgaggcagcaagaggttaatttgttttgttttgttttgttttgttttgttttgttttgttttgtttgagaaagtcttgctctgttgcccaggctggagtgtagtggtgtgatctcagctcactgcaacctctgcttcctgggttcaagcgattctcctgcctcagcctcctgagtagctgggaccacaggtgtgtgctaccacgcctggctaatttttgtatttttagtagaaatggggtttcaccatgttagccaggctggtctcgaactcctgacctcagatgatccgcctgcctcggcttcccaaagtggtgggattacaggcataagccaccgtgcccagcctaagaggtttttaagtagggagggatcagccctaatttttgcttaagaaagaaaactccagaaatgttggaaaacagtgccttgagtcttgcagccatttgggtataaaagatgagggaagccagttgaagagggtaatccacaaggcttaaagagccttggcttcccccagtgtatccccctaatatcaattgcttgtttaaaattcaatttgtttaatgcacagataagctaaaacctccaccgtctacagggttcctgttgtttgctcagtgcagagcacaatggctattgtttagcaggtatttaatgaggattgttgagccatgagatgagggcaggtgagagagaagcaggtgtggaagccaggccaaggcttctgcttggtgacaccattaactgacctggaaaatcctggaaggggataggtttgagaggaataataaaaataaaagctgcgttcatggagtgccagatacaggtcaaagctggagctggacttccccaaccttccccagtccccacaaacaaccctatccagtgcgtgtttctatctgacgcccgttttcacaaatgagaaaaatgaggctcattggggttgcccagggccgagatgagatgagcagcatggctggagcctgcgctgaaccccattgccatcgggagttcctctttaaggggaggtgggccccccattttcagaccgtagggaaagaggcagggcctcagaagaatctggaggcacagatgtgggtttgcaacctggcactgtgactgtggacttggagctgagtccacatcagtgtaggcagagtggcacatcacattcctgggctgctacagcaaaactgtaatgaccaggcctgggtcgcttaagcaacagaaatgtgtttgtcaaccttggcacggtggtggctcatgcctataatcccagctactcaggaggctgaggtaggagaattgtttgaggccaggagttctagacaagcctgggcaacatggtgagacccctgtctctaccaaagaaagccaggtatggtggcttatgcctgtaatcccagtgctttgggagggaggccaaggtgggaggattgtttgaggacaggagtttgagaccagccagggcaatacagcaagaccccatctctacaaaaaataaaagaaaaagaaatttattttctcacagttctggaggctagaagttcaagaccagggacaccagtcatactggattagagtccatcctagtgacctcatctaacttaattttctctttaaaggccctatgtccaaatagacacattcagaggtactgagggttagagtttaagcatatgaattttgggggtccacaattcagcccatgtcaagcagcctggagatcatgaagagtcaagggatgagggagaagaaggagacagagggcctggggaagcagggggaggatttcagcacaagggtggagtggagcctccagctggcctgggtgagaggggcagggtgaggagggccacgttcctgaacccagacccctggataggaggatgctcaggagaagaatgaggctgcatggcaaatgcacccgtcaggcagacctacttcagacgaaggtcagtgtggctgtggaggccccgctggtcatccccagccagggctgtggtgtcttcatcatggagaatacaggccgctccccagagctgtggtgtgcagggctcaggccgcactgaccccttccctgctgggctgagcagctggaaatccaggctgcaggggagccatttcctcagggagccctcccactcctcacacagagtctgcttcaggcccaggccacacctggaacaaaggcggtcacgaccacccctgaacccctggccacaggacccagagccccagttcaacccccactgtgaaccactgtgagcactcctcatcttgcccacctctgaaggggccagctttgttcttttccttctccttgccgcctgtctggaatcggcctgtggcggctcccatctggtggccaaaggaccttgggctgtaagataggaaaaggctgaactctgttgttggacacattctgggggcttccaggtaccaagcaggaggatcaaaccttcccagggaccagcatctttcattaacaaaatccaaaaccatgtcacaggaccctcaggagcctactccgtgggcatggggcagccacagagccagccttggcctcggtgctgccctcagtcagctcgtggtccgggaagggatcatacacactgccacagtcacagcctcacacttacacatggacacacccacacatgctcccacacgcatgtgcacacacacacacgcacacacacacaccataggatgcttctgttttatttgacaccaaactaacacatcttggaaacttcttatggaaacaccaacagtaaacatggaaagtggaaataaaacacacacccgagatgattcctaattagcggaaacagccctagtctagatccagagaccctggagggacacgaacgtggtgcaggtcaaattccccgttgtccagcgagggtcatgggctgcccaaggccacacagctcactgccctgtgccatgtccaatccccttgcagcctccctcagctcatgctcaagtcacacaggcctccccaggcctgccctgtcaatgctgacccacaaacaggctcacataatgctccctcccaggggcacagcagccttggctttgatctgaggtggggctttcctggcctgaaagttgatgtggccagccttcaacctgtcccccatatcaccgtctgcttttggagacccagggcaggaagctgaagccttatgtgggaaaatgagggctggtcccacggcagccctggggaccagctctctccttcgctttatgtattatttcatttttaattacagaaccaaggtagcagagcctctcaggctgagccagaaaataatcagctttttaatttgatttttgttctcccaaaggagaacaaggggctccaggggcaccatgaggcctggaccttggagatatggttagatcctctaacctatagatgcttgactccaggctggctcaccatctacagtggggtgacctccgcaggccccagtttctctctctttaaaatgagcggttggaccaaagcttcctctcaggtcccttccagcaccaagcctctctgatctctgagcagtcctcaccccacatgcgtggctttgcaaattttccgacctctcttccatttctgagctttcatctttttctgtaacggcataaaaatatcctccttacctccctgtccctgattctagcgccagtctgtggctgtccaggggtggggtggggagggtctcttcctgcctctctcagttcttttctgtcccctctggctttccccttctctccccaaacctctagccactagttatttcccagagtttttcctctgtgctcccctcagtatcatctctgctcttgtacctctgtagctgtgcctggccatctactctccctgctctcttacctcctgccaaagaccccacatctgaccttctgcagagtcctggatgtggcccctggacttcccatcagttcttcagactgtccctgtccaatcttctttccactccccactcccgcacctgcctgtcctcccttccctgcctcaatgaatggtgccccctccaccctgcctgatctatgccatgggtccaggcaagtgcaaggtctggccctgggaccagaaggatgggccttgactcagggcgaggaaggaccctcttcctagcttcccccaaatagcttgatccacctcccttctcagttacactgtgcagctttcttgctctgaaaggttggagacatttactgtttttgaaattgtaggatctctgttcctcagacccaaggtgcagaatgtcttggttatgagtcggtgacaaagccctgccaaatccaggtctccagactccaccccaggggtctccctggtctgacactgcaagctgtgctcctccccaacctcccaacatctggactcgctgggagctccctggagctggaagcatgggctggtttcagcaaggacctgctgtcactgggctgaggaggacaggccactggtgctgccccctcacaggaaggtccatgaacaatgcactaggtgccttcctgtcagaagatgctctgggaattcctgggtggccagagccctccaccctgggtctagggaaaccaacccttaaaagctagccaggcgcggtggctcacgcctgtaatcctagcactttacagggctgaggcgggtggatcacttgaggccaggagttcaagaccagcttggccaacatggtgaaaccccgtctctactaaaaatacaaaaattagctgggcatggtggtgggcgcttgtagtcccaggtactcgggaggctgaggcaggagaatcccttgaacacaggaggcggatgttgcagtgagcccagattgcaccactgcactccagcctgggcaacagagcaagactccatctctaaataaatgaatgaataaataaataaataaataaataatagcttatttccagagaaggagatggagtggagcccacttcttattaagacacagccggcagatgctggtcagcccaagaggggagaactaactggtgttctgtgtggactctgaatcctgttccttgccagagctgagccttggatggcacagaaacttcccagtccacaccaaggattgctgactgagaaacaatccggcctgcaggcatgggcctggggctcagagggctctggacagctgacttctggttgggaaactgattacccttctcagtcctgggagaccttccttggcagaggcctggcagcatttagcaccaatgggggttaatccagagagaagtcccaagcaccccttttctctctcctagtgatttagagctgaaaggaatcatctcgtctatctacctcattttacaaaagaattgaaatccagagttcaccaagcttgcacagtgagaatgcccatcttttaattcattcgacaaatattgatgaagtgtctaccatgatacctcattgtgctggtcattgttctaggcacagggacatagcaggaaacaggttagacaaattttctgagctcctggaagcaacgctccagcggggaggcagtcaatagatggttaaagaagtggagaagaaaatcttagatagtactaagtactatgaggaagataaaccagaatgataaagagagatagtaattggtagaggcaggaaggaacatgtagatatgtatgcatggataagagaggcctttctgaggaggtgacatccgatcctgaatgataagaacaagttaacacgcaaagatctgggcacagacccttgcaagtagagagaacagcttgtgcaaaggccctgaggtgcaactggcatgtcacgtttggggagagtaaagaggcctgtgtgcattgttctcagggagcaagtgaggagaggaggagaggtaggacctgaggtggagcaggcaaacctggcccaggtcagctgggctttaaggacatgggaagaaatttgaattttatccaacgtgtaataagaagtcactggaggtttgttttttttctctagtagactttattttttagagcagttttaggttcacagcaaaattgagaggaaagcacaaaaaattcctatatactctctccccctatatgtataaactcccccactatcaatgtccccaccagcctggtacagttgttaaatttgataaacctacacagacacatcattttgtttgtttttttgtttgtttgttttttgagacagagtcttgctctgtcaccaggctggagtgcagtggcacagcctcggctcactgcaacctctgtgcccttcagggttcaagggattctcctgcctcagcctcccgagtagttgagattacaggtgcccaccaccacacccagctaatttttgtatttttagtagagatggggtttcactgtgttggccaggctggtctcaaactcctgacctcaggtgatccactcgccttggcctcccaaagtgctgggattacaggcatgagccaccacgcccggccacagacacatgattataacccagagttcagagtttacattagggttggctcttggcgcacatttgatggtttgaacaaatgtataaacgcatgtgtctaccagtacagtaacacacagagtagtttcactgccctaaaaattctctgtgctctgccggttcatcccttcctcctctctagcccctggaaaccacacatttttttactgtctccatagctttgtcttttccagaatatcatatagttgcaatcatatatatatggcctttccagattgacttctttcacttagtagtatgcatttaagattccttcatgtcttttcatggcttgacagctcattttttttttagcattgaataatatttcattgtttggatgtaccacagtttatttacccattcacccaatgaaggacatcttccaagttttggcaattatgaataaagctaccatcaacatctgcgtgcaggttcttgtgaggacataagtttccagctcatatggtacttggtaagtaccaaggagcgtgattgctggatcatttgataaaagtatggttagttttgtaagaaactgccaaactatcttccaaagggactgccattttgcatacccaccagcaacgagtgagagtttctgttactctgcctgttacttcatcagtgtttgatgttgtccatgttttggattttggccattctaatagttgtgtagtgatagttcattgttgttccccactgacatattccttaatgacaaatgatggttagcatctttcttttttttttttttttgagactgagtctcgctctgtcacccaggctgggagtgcagtggcgccatctcagctcactgctgctagctcccactcctgggttcacgccattctcctgcctcagcctcccgagtagctgggattacaggcgcccgccaccatatccggctaatttttttgtatttttagtagagacggggtttcaccgtgttagccaggatggtctcaatctcctgacctcgtgatccgcccgccttggcctcccgaagtgctgggattacaggcttgagccaccacgcccggccaatggttagcatctttttttggttttgttttttgttttgttttatttttttgagacagagtttcgctcttgtcacccaggctggagttcaatggcgtgatctcggctcactacagcctccgcctcctgggttcaagccattctcctgcctcagcctcccaagtagctgggattacaggcgcctaccaccacacctggctaattttttgtatttgtagtagagatggggttttggcatgttggccgggctgctctcgaactcctggcctcaggtgatccacccacctcggcctaccaaagtgctgggattacaggcatgagccaccgtgcctggccagttagcatctttttatatgctttcttgccatctgtatatcttctttgatgaggtatctgtccaggtcttttgcccatttcttaattgggtggttagttttcttattgttgagctttacaagttcttcaggccaggcacagtgactcacacccgtaatcccagtacttttggaggccaaagcaggaggatcacctgagacaggagttcaacatgggcctgaaccccatctacaaaaaatacaaaaattagctgggcacaatggtgcacccctgtaatcccagcactttgggaggctgaggtaggaggatcacttgagctcaggtggttgaggctgcagtgagccatgattgtgccactgcactccagcctgggcaacagagtaagaccctgtaagaccctgcttcaaaaattcaaaaaacaaacaaacaaaaaaacacagaaaaaaagagttatttgtatattttgaataacagttctttatcagatatgtcttttccaaatattttctccctgactgcggcttttctcattctcttgacagtgtctatttctttttcttcttgaaaggtataactgagggaatgacagtgtcttttgcaaagcagaggttcattttaatgaagtccaactttatatcaattattcctttcatgggtcaaaaaatgtcattgccaaactcaagatgatctatgttttctactatgttctctttttggagttttatagttttgtgttttacatgcaggtgtatgatccattttgagttaatttttggagagctttgattaatggaatatgttttctgattaaagtttgtcacagaccactgttgactccgaggatggagaatgcgagcaggtggaggcagttgcagttgccctggcaggtgatggagggtcacgaatggatataaaatgtgttttcgaagtgagaccaagacacctgctggggactgactctgagggatgtgggataggaagtattcaagaatgagccctggccaggtgcagtggctcatgcctgtaatcccagcactttgggaggccaaggccggtggatcacctgaggtcaggagttcgagaccagcctgaccaacatggtgaaaccccacctctactaaaaatacaaaaattagccaggagtggtggcatgcgcctatcatcccagctacttgggaggctgaggcaggagaatcgcttgaacctgggaggtggaggttgcagtgagccgatatctcgccattgcactccagcctgggcaacagagcaagactctgtctcaaataataataataataataataataatataataataataataataacaacaacaacaacaacaataagccccagggctgggtgcagtggctcatgcctgtaatcccaacagtttgggaggccgaggtgggtagattgcctgaagtgaggagttcgggaccagccagaccaacatggtgaaaccccacctctacaaaaatataaaattagccaggtgtggtggcacacgcctgtaatcccagctacttgagaggctaaggcaggaggatttcttgaactccggagatggaggttgcagtgagctgagatcatgccattgcactccagcctgggcaacaagagcaaaactctgtctcaaaaaccaaacaaaacaaaaacaaaaaacaacagaatgagccccaggtctggagacctggctgggtgtactgagatgggaacaggtggcagtggaagggcattcgggtagatgattctggtgcccattggagaggccaggctggcagtgggagcccaggaggcagctgtgaatgactggcatgtgaagtggcacttggtatagaggagaaaagagaagcaggctcttttcttgacctctggctgtttgtaacacgcagttcacaccctgggacccttctggccaggggttggagagagggtaagacactattaattcacaggactgattgggtgtgggccagggcaagggagatcagtaggggcagactgaaggcaaagcccccagacctattatccctctgcaaacagagacctctttcctgaatgtggatttccaatgggttcaagagttttgctggggaaataaaataattgggcaatcagccagaagaaagcgaatgtggattgggagactgtttacaatgggctgttgcatcctcaggagggagggcagccccatcctttgtcatgcagaggaaggagcctggcttcctaggcctgtgggtgggtgggggtgggggatctggctggtctgcagggtcagatagggcccaaaaggccaggaattgtgaagtcatcctgaagccacatctgccatcctggagggcagcagggggcaggaaatgggagaacgagaggaagctcaccacccccactgagggcccagccctgggactgaacttgaggacatgatgcagggaggaggaggaggaccaggtaggagggcagatgaggaatgggaccctgtgccctcagccaccctcctgcccctgataggccaggatgtgactccaaccagaggccaggttgccaggtgagggccatgggaaaacacagaggtcagaggtcatcgtggggcctccatgggtggggatgagctggactcaggcctaggctctgaggtcagcaaagctaagagtccaggagtggagtggcttctaattcggagcccagcatctggggtctccagggtggcttttgtcccctccctgggcaggggcagacactactgagagtgctcaggaaataccccaaggccagtccaggtgtcttgggctgccccaacccacaccatcaacctccctgaccccaggcctgagggcccatgtggctccttggggtttccagacatgccctgtgtgggccctccctgttgtccttgagtagctcagactcccatggaggacagtggggaacgaggcaggaataaagacccatgtttcaggtcatccagccccttcctggcaagagtgagttctcagttcagtctccagtgtgccactcaccagctgtgtggccctggacaagtcgctgaccctgcctctgataggccgtccacaagtcagttggtgaagccgggagtggctggattccgaaagaaggcgagagaggacgctttgcagccaggccccagtggtggctggaccttgttgcccaggatggctccgtgtggttgcctggcacgcatgtaatcctcactgtgcactcggggcatagatagaattgatgccccatctcatagtcaaggaagctgaggcactggcagatgatgaatttgtccaaggtcacctagctaggattgctcctcccctgcccccctacagtgctctcgttaacaatctgcgacctcgggcaaggatcttagatgctctgggcctcctttatgaaatgtcaacaatgccttcctctcagggcatgggggacagcgaaggagaaaaggagaggtaagtgaagcgaggggagaaaccaggcttcctgaaggtgactgtggaaccagccactgcaagggcagctcgggcacctgtgggctctggaactcgcctttgcggagtgcctgcctggcccaggtccccacactgcacctgtacttcctgttgttgaggttgcccctgtctcttcaggttcattcaggatactgaaaaggggcagaatcatcaacaaatatttgcttaagtaattgaaaagaaagggaggccggaagaggagcttatggagatgaatggcttctagaatttccttcttcaaggcaagatttgaggacagggactggtttatgtgagtgttttcctttttgaacattttttttttttgaggcagggtcttgctctattgcccaggttggagtgtagtgatgcgatctcggctcattgcaacctctgcctcccaggttcaagggattctcgtgcctcggcctcccaagtaagctgggattacaggcacccgccaccacgcctggctgattttttgtatttttagtagagacagggttttaccatgttgcccaggctggtctcgaattcctgacctcaggtgatctgctcactttggccttccaaagtgctgggattacaggtttgagccaccgcacccggccttctttgtcatttctcaatcctggaaagacttttctttgaaaagggaaaggaggtgtttttggatggagatgctgggaagtagcagctttcaggaggcgtggaaggagggaagtcgaggctaaagtgtcagctgtggagagagtggcaggagcagccgtcaatcatgaaatcacttttgctatggcacaaggcagtatgcacgtttatgctgccacagagatgtggtggaatcaaaacaccgtctaggtgttttccccaacaggaagtggttcactgataggtggagctgaggtatgacttaagccacaaagagaacaaacaaaccaaacttcactgcatgagcctgggcagctgggggcagctccctacacacagggcaggcctggatctagggagattgggaagccagtggcacctacttcatctgccaggggacaacttgcttctgttgctgccagcactgggtggtgttgaaacgctgggctggactgtggtcgcttaggcagcagacagacttcccaatgaggccctggggctaggagggcagagtgttggtgggataggtccctgaatataggggacacaggtcctcttataatttccacctacagctctctgcatgcctgagggtatttcctgaaaagtttgtatacaatgactgcaaataatcaaaatgagtaactgtagaagaaaatcggaggtgtaaatattagaaacgaggagcagaattatcactattaattagcaaatgacttttttccttcccacaaaagcaaacaaatccatctctacacactctacttctgcatggttttgaattttaaacaaatggaatcgtattcatctttcatgtctggcttctgttcaatgttctgcttgtgacatttgccaatgttgtagacagtttcggttcattttctttgccataaagtattccataagactatactacattttatttgtgctttacagtgtcgatggatatttttggtgagttgcttcagtttggactcttataaacaatgctgctgtatcatcaatcttatgcatgcatttctgtccaactgaatgaaatgactgtgccttttttctttctttttttttttttttttgaaatggagtctcactctcttgcccaggctggaagtgcagtggcgtgatctcggctcacggcaacctctgtgccccaccccgccacgggggttcaagtgattcttctgcctcagcctcccgagtagctgggattacaggtgcccatcgccacacccagctaatttttgtaattttagtagagatggactttcaccatgttggccatgctggtcacggactcctgacctcaggtgattggcccacctcggcctcccaaattgctgtgattagcggcgtgagccactgtgcccggccccttttttgtttttaagagacagggtctcgctctattgcccaggctgctgtattgcagtggtgcaatcatggctcattgcagcctcgaactcctgggctcaagcaatcctgccacctcagcctcccgagtagctgggagtactacaggtgtgtgccaccatgcctggctgattttttttatagtagagatgaggtcttgctatgttgcccaggctggtcttgaactcctggcctgaagccatcctcatacctcagcatcccaaagtgttgggattataggcatgagccgtggtgcctggccattgggtcttaagtttacctggtatcttgaactgtagtaaatactgccaagttctctagtgtggtgtagcactttacgctctcaccagtgatatctgagagttctcactgctccagatattcatcaaattggttttactcaacatccattatattattattattattattattattattattattatttagaaatagggtctcactctgtcacccagactggagtgcagtggcacaatcatagctcactgcagccttaaactcctgggttcaagtgatcctcctgtcttagcctcctgagtagctaagtgcacaccaccacacctaatttaaaaatgtttttgtagagatggggtcttgctatgttgcccaggctggtcttgaactcctggcctcaagcaatccttctgccttggactctcaaagtgctaggatttaaggcatgagccaccatgcttggcccgttctcgatttttttttttttttttttttgagatggagtcttgccctgtcgcccaggctggaatgcagtggtgcgatcttggctcactgcaacctccgcctcctgggttcaagcaattctcctgcccagcctcccaagtagctgggatcacaggcgtgcgccactacacccagttaatttttgtatttttagtagacacggggtctcactacgttcgtcaggctggtctcgagctcttgacctcgtgatgcgcccgcctcggcctcccaaagtgctgggattacaggtgggagccaccgcgcccagcccgttcttgatttttaaaaaattctattatggatacttcgttaacatgataaaatgtatttagctcaaccgtaaagctcatactcaatggggaaatagtaaaggagtcctattaaaaccaggacaaaacaatgctatccattatcatcacttttattgaatattgttctagaaaaactactaaatggagttagacaatagaaaaaaaaattccagaggaataaactttgaaaaagaggaattaaattattagtagcaaatattaagattttgtacctagaaaatgcaagaaatcaactaagaactgttaggtacaataagaagttccagtaaagtcttctatgcaccaattttgaactcactttactggaatgtcttattgtttgtaagaagtttgaagaggacttctatgtaccaattggtaccacagcctgaaatcttcaggctgggcacagtggctcatgcctgtaatcccagcactttgggaggcctaggcgggtggatcacttgaggtcaggagttcaagaccatgaaaacctgtctctactaaaaataaaaaatagccaggtgtggtggtgtgtgccagtaatcccagctactcagaggctgaggcaggagaatcacttgaacctgggaggtggaggtggcagtgagcagagatcgtgccactacactccagcctgggcgacagagcgactctgtctcaaaaaaagaaaaagaaaaagaaatcaagtctttaatgacacaaataacacttaagcagtgtgatggtataaaaaaatcccatcttcaatacaaatgaaaagcaaactacccaggagttgatttaacaagttatttataagatgttttaacaagttatatgtaagacataagacaaaccatgaggaaaggcaaactgtgttcttagatgagaaaatgccagtgcttcctaatctgtgaatttaacataattcaataaaaacattagagtatgacaaaaaaaaaaaacagcataaacaaagtataaaacacaaattatacatgggagaaatatttgcaatgcatataacagagaaaaggctaatgtccctgatatataaagtgtctacatatcaataagaaaaaacaactcagtagaaaattgacacaaggtatgaacaaacagttctcaaaaacagaaatataagctgagcatgatggcacacacctatgttcccggcttctccagaggttgagacaggagaattacttgcacccaggagttcgagaccagtctgggcaacacggcaagacttcctctttacaaagcataaaaaattttggctgggcacggtggctcatgcctgtaatcccagcactttgaaggggcggagatgggcagatcatctgaggtcaggagttcgaggccagcctggccaacctggtgaaaccccatttctactaaaaatacaaaaattagccgggcgtggtggtgggcacctgtaatcccagctacttgggaggctaagacagcagaacctcttgaaccctggaggaggaaaatctcttgaacctgggaggtggaggttgcagtgagccgagatcctgccactgcactccagcctaggcaacacagtgagactctatctcaaaataataataataataattcagctgggtgtggtggtgcacatctgtggttccagttactcgggagactgaggcgggaggatcctttgagcccaagaggttgaggctgcaatgagctgagatggcaccactgcactccaggctgagcaacagagtgagaccttgtctcaaaaaataaataaataaaaataaaataaaaatgtgcagatgaggaacaaaaagagactgacattcttccatattccctttcctatcttttgaaagttgtgctatttgtattaattacaaacaaaaacaaaaacaaggccgggcgcggtggctcaagcctgtaatcccagcactttgggagggggagacgtgcggatcacgaggtcaggagatccagaccatcctggctaacatggtgaaaccccgtctctactaaaaatacaaaaaaattagccgggcgcggtggcgggtgcctgtagtcccagctactcgggaggctgaggcaggagaatggcgtgaacccggaaggcgaagcttgcagtgagccgagattgtgccactgcactccagcctgggcgacagagcgagactccatctcaagaaaaaaaacaaaaaacaaaacaaaacaaaaccaaaaaaattcagtttcaacaccagaggacaaaaaagaaaaaggaaacaaaataaaaagaaaaaaagaaaagaaaaaagaaaaaaaagaaacaatgttaacacacaatttaaaaaatttaaacatttaaaaaattactaacagtataagagactcctactatttattggtcacctagtgtgtaccaagagggtgtgctaggcaccctgtagacatctcaattaatacaaacactgcaagaaaaatacattattcccattttataggtggaaacgtattgtattgaagaatgtggaaaacctgccagtggctgggtgtggtagctcacacctgtaatcctagcactttgggaagccaaggcaggagaatggcttgaagccaagagttcaagaccaacttggccaacatagtgagacccccgtctcagaaaaaaaaatttaaaaatatgacagggcgcggtggctcatgcttgcaatcccagaagtttgggaggccgaggtgggcagatcacctgaggtcaggagtttgggaccagactggccaacatggtgaaacccccgtctctactaaaaatacaaaaaaattagccaggcatggtggcgggtgcctgtaatcccagctactcgggaggctgaggcaggagaatctcttgaacccaggaggcggaggttgcagtaagccaagatcacaccattgcactccaggctgggcaacaagagcgaaactccatctcaaaaaataaataaataaataaataagaataatattaaaaaattaatttgaaaaagtaaaagaaaacctgccagaggccacacagctagtaaatgtgagtggcatagcaaggtttgaactcactcttgccaagaagggtgtcatgttggacccccaagcaggcaagctgggagggcaccaccttggagagaccaaagaaaagacccagagacagcaggcaagacatgagctttattcaagggacttacgcacagggggaagtccaggagcggcaggctggacaggagcaaccgctgccatttgtgaaaagtgtgcaggtcatgtagaaaccttcacattgcaacatttgtttgtttggttggctttttttgagacagggtctcactctgtcgcccaggctggagcgcagtggtgcaatctcggctcactgcaacctctgcctcacaggttcaagcgcatctcctgtctcagcctcctgactagctgggactacaggcgtctgccaccaagcccaggtaatttttgtatttttagtagagtcgaggttttgccatgttggccaggctaggctccaattcctgacctcaagtgatccgcccaccttggcctcccagagtgctgggattataggcgtgagccaccacgcccagcccaaaaccacattgcaacttccatctagcaacctctacttagcagcctccacctacctcaaaacaatggacctctgttccttgtacagcctgtgttccaagtaacaggccaggggcctgacattcttcatagttaaacataattaaacatccaggttggccgttcccacggtccatagcctggaacactgaacaaacatcaccaagggacaaagggtccttcccaggccatgcttgagttgttgctgtctggcaagatgtgcccaccacacaaaggtgctggatgaactgaaacgggtccctattcctggtttgtttcccaccctcctcagcccagacagagccccagggaaggacccctgatgatgccagagtctgagctactttgggagaacaggaagtgcccacacagggggtgcctggaaccaccaaggagccacatgggcccccaggcctggggtcagggaggttgatggtgtgggttggggcagcccaggacacctggactggccttggggcatttcctgagcactctcagaagtatctgcccctgcccaggaagggggcaaaagccaccctggagaccctagatgctgggctctgacttagaagccactccactcctggactcttagctttgctgacgtcagagcccaggcctgagtccagctcatccccatccatggaggccccaggatgacctctgacccccatgttttcccatggctctcacttggcaacctggcctctggttggggtcacatcctggcccaccaggggcaggagggtgttcgagggcaaagggccccactcctcatccaccctcctacctgggccccctccccctctccccagtatggccagaccactgccctccagtgcccttagctctgggccgagggccaggtccaaatgtgctctgagtcagggtagggatcactcattcccttgccccgctctcctcccttagatagaagatctggttctggggccactttaccatctcaagcccaatctgggcagacccaggtggggatggttggggaagccaggctccgtcttctgcatgacaaagggtggggctgccctccctcctggcaacacttcagaccattgtaaacagtctcccaatccacatttgttttatttttcgttgtcagatctagcaaataaaaatataggactctggtgaaatttgaatgtcaggtagacaatgaataatttttttggtataattatgtcccaaatagtgccttgtattttatctggtagccctacccctggctgatcacccaaatgttttatttccccagcaaaactcttcaaccagcttacaaatccacattcaggataggggtcctctgtcttgggggattgtccccctgccccagcctagacctgatcacctggattgagaccacctggctccctttagggcatagatcaaaactaggctgtaaataatttgagtgtgccaagaactttgtgaattgcaagacctgactttatatggacattgatcattaactttgtgagcttcgggaagttgacacctctgagcctcggttttttttcagctcaaaaattgggagaggttgccgtgagccgagactgcgccattgtactccagcctgggcaacaagaatgaaactctgtctcaaaagaaaaaaaaattgggggagaaggtagcctggatattcctttcaactctaaactctaattctgtgaacagcagggatgagggagaggatgaggctccttccttattggacaaaaccccgttggaactaaatgctcctaggctcccttgcctaggaaggtccccccagaacagtgggaaatctggtttcacaactggggaccaccagctcaggatctcatgaggccccgggaccctctgagcacgggcccggatgctcatccctgcagactggattggcccttagagccctggcgttgcctgagccattctggttcctgtcagttgtttggttgcagcaaggaacaagactctaggtccacttaccagcagctgggggaactgagcctcttgcagagaacgagagccccacctctactctaggaaatgagctttttaatttaactggtcaggcctcaacccacattaggggttcatgaccattgtatagacagctgtagccagctgttcacagcccagacagacttgccctatctagacagccccctcctcccagctcagggactcgtctggctgtgagcttccaggaggtctcaggggtgtgacctccctccctccttccctccccactccctacctcctccctccaccccaggctataaagctgcccaggcttggctctcagcacatccagctgcctgagaccctcctgcagccttctcaagggacagccccactctgcctcttgctcctccagggcagcaccatgcagcccctgtggctctgctgggcactctgggtgttgcccctggccagccccggggccgccctgaccggggagcagctcctgggcagcctgctgcggcagctgcagctcaaagaggtgcccaccctggacagggccgacatggaggagctggtcatccccacccacgtgagggcccagtacgtggccctgctgcagcgcagccacggggaccgctcccgcggaaagaggttcagccagagcttccgaggtgaggccctccctccctgctgcccctggtcccatggggcaggtcagatgtgcccactccggtggtgtcaaagggctcctggccttgcagaggtctgtgggaggctgagtgagggccacggtctaaggggcagtgaggtggggccgggcctgtgaggatggcggggcctcagcatgcagcggtgcatgcagtcaggactccgggggtctgttttcgtactgccactctggtctgagttctacttggagcatattgctttaaaatcatctcacaaccatttgctcacatggaactggggtataactatgtcttgcccatcttccagcattgtgaacatcaaaatgagtcattgtaaatagaagcgtgtttgggtaactgaaaaatactgcacttgagtagacaacctgggttatacctggctgtcaggggtgcagcgggcctgaatcctcctgcagccggcctgaatcctcctgcagcctctcgcctccctagctcctcagtgcccagagctagacccaatgccaggcacctgggtgaggattctgctcccagcatctcagctgaggcaaacttgctagccagggtcccacaggcgcccctgcctgctggatggaaattgttactaaacaaggcccagatccaaggaagatttgtaaactgggtttgccccagaaatagaacagggccggtgtctcctggcctggctgccagctcagtggccctgccatcctcagagctcccctggagtcgggggaggccctgctgaccctgctcttgtccccagaggtggccggcaggttcctggcgttggaggccagcacacacctgctggtgttcggcatggagcagcggctgccgcccaacagcgagctggtgcaggccgtgctgcggctcttccaggagccggtccccaaggccgcgctgcacaggcacgggcggctgtccccgcgcagcgcccgggcccgggtgaccgtcgagtggctgcgcgtccgcgacgacggctccaaccgcacctccctcatcgactccaggtgggggtcgcgggggcgcgcagggtagggggagggcgctgctaggcccggcttgggggcggggacgcgggggggcggtgcggggtcctcggggcccgtcccagtccccgccctcaagcggcgctgggtctctgtgtcatgtctcaggctggtgtccgtccacgagagcggctggaaggccttcgacgtgaccgaggccgtgaacttctggcagcagctgagccggccccggcagccgctgctgctacaggtgtcggtgcagagggagcatctgggcccgctggcgtccggcgcccacaagctggtccgctttgcctcgcagggggcgccagccgggcttggggagccccagctggagctgcacaccctggaccttggggactatgggtaggtgctgagggtcaaactggtaagccggaataaagagacaggcaattacatttattttgaaatggacaacttttcagagtgctgtgggaatgaatgagacaatgtatacaattcttcctctgactcttaggagatcctcagtaaatatcggttattaattttcaagttatttctagctgtccatcctatatcacaaacatccagctttttgaagttgagaggtggatcataaatctccatcccagacgccctctgacctcagccctcccagctgaccgctgaccctgctctctttgcccacacagagctcagggcgactgtgaccctgaagcaccaatgaccgagggcacccgctgctgccgccaggagatgtacattgacctgcaggggatgaagtgggccgagaactgggtgctggagcccccgggcttcctggcttatgagtgtgtgggcacctgccggcagcccccggaggccctggccttcaagtggccgtttctggggcctcgacagtgcatcgcctcggagactgactcgctgcccatgatcgtcagcatcaaggagggaggcaggaccaggccccaggtggtcagcctgcccaacatgagggtgcagaagtgcagctgtgcctcggatggtgcgctcgtgccaaggaggctccagccataggcgcctagtgtagccatcgagggacttgacttgtgtgtgtttctgaagtgttcgagggtaccaggagagctggcgatgactgaactgctgatggacaaatgctctgtgctctctagtgagccctgaatttgcttcctctgacaagttacctcacctaatttttgcttctcaggaatgagaatctttggccactggagagcccttgctcagttttctctattcttattattcactgcactatattctaagcacttacatgtggagatactgtaacctgagggcagaaagcccaatgtgtcattgtttacttgtcctgtcactggatctgggctaaagtcctccaccaccactctggacctaagacctggggttaagtgtgggttgtgcatccccaatccagataataaagactttgtaaaacatgaataaaacacattttattcta

SEQ ID NO: 397 - DNA, 165600 bp, Homo sapiens
actacaaaggatgtctgtgatgacagtggccatcccatttgatcctcgttattcttcttttatcgaaggaaactgagagtcaccttcttttctaggcagttaggtaactgaagccgaaaggtattgtgacagatccactgggctgtaaaaggcagcgtgtggaggtggagcccagagtttctgcctccacagttaaaagctcagacagggctttgggagcagggcctgcaaatcaaagatgaaagaacaacctgtcttggagcgcttgcaggtaagctcaggctgctcgactggcggggaacaaggaccttaggcgattcgctagatctgcgcccccggccttagatagaagtgggtggggccagggacactacatctaacgaggatctagaatagctaggatttatgaaataccggctttcaagttctctggtctccacccaaagatgattatcctatctaaggtagtgtacgctactacagggcaggtcccgcagcccccgtttcaagagctgggatgcggccatagcggaggtggtgtcagagcggaaacctagcgggggtcgggggttcagctcggggcggtgggaaacaccccgggagaggaggcagctctgattccgctccgggccggagggagaggagttcggaggtggcttgagctgagaatccggaggagagaaggcgcgttttgagctgccacgggcacagatctcagacccggacgctgactagccgggggtcgcggctttccgaggcggctggagaagtgcccagacggccgtccctccgcgcccctgcgcgtccccgtgcgcccagtgttccccgtgcaggagtcccggagcgatgacagcgccggttacggtaaacacccgccccgccgcagtccgcttccttccccaacgcggcgccgcccggacttgcaacctcaggagtccccgctggctcctctccaccgctggcatatggcgcaacaggaagttctgggggcttggagagggagggtgctcctggctgttgggagagcactggagacgcttgggagagtagtggagatcctggtaatttcttggtctcgcctattttgtctggactttctcacactgtgtatgaaaaataagtataattgagcacattgtatttcaggaatagtccaggcagcttagcaaacgttagctcatttcagcctgctctgataagaacatatgctctggagccaggtagcctgaattagcatcccagctgcatcactacctgtgattttgggcgagttaacatctgttcttcggctttctcatctggaaaatgggataatacgatttgtagtttcaagatgaattgaaatgctacatgccatttgcacttagaataatgcctgacgtatttagcaggttgtaagagtttgggattcttaactatttcatcctggcagtaatcctataaagtccaagtatcctgtctctcccatctccaccggtttacaggtgaggaaaatgaaaccaaaggagaaaagcagatttgagatttgaactcaggtcagtgctttaagacacggagaacataaaaaagaaaaaaaaaaaagagaaaaaaagacactgagaacatagatgttctagtcatacacatcatttgtgattatttgttctagggagaaatgatcacctttaattgttaaagtgggaaacgagttattcaatttctttccccctgtatacagattttgatgtttcactgtcatctgctttgggttcttacaggactgataaagcgttagctattttggccagactggaatctgggcttgactttaagaatctggttgtttcttatgtttcccaccaggagtggtaaccatctagggtaggagttagcatgagttttgttttttgggccaaaactggagactagtaccctttggtagtgttaaacttgtcttgatagacaagggcatgaatagcatttgagatcattataccagaggtgaagggaaagaatcgtgcaatatgttgcaatttgtcacaaattttggtcttatcttgcctatttacaattatctatcatagttaattttttggataggacatctatgccaaaactatcaagcatttggtaaatactgtgcctgaaatatggcttctctctttttccttctttttcaaatttctcactttttattttattttatttttttgagacagagtctcgctgtgttgcccagactggtcttgaactcctgggctcaagcaatcctctttggcctcccaaagtgccaagattacaggcctgagccactgtgcctggcctcactgtgttttaaatcatgagttttcagtataaacagcccaaataatctgagtgattttcattatacttctggtagaatcaataccatgctggaactgaaagtgaccatcctacctataactcagttattcctttgtgacacatcagaagtctacatggcaactattttctgtaaaatccatcactgttaggtaagatattatgatgtgagtctcactagtgccttttttctttacttcttagttttattgaagttttacgttctcattgttcagaatcaattaattccatagggttaatatctaaaaacagtagaaccctccatcacttcctgctttttaagagaagtaatcatgttcatctcttttaactagttactatttgtctgtatctctagatattccttataattgctccttcttggtttttgaggtttagtcatcatgcattgactttcctgcaagaaatgtgtggatttaactcttttctgttttcctgccactaccacttacatgcatcctacctattccttccatagatcctctgaatatagttatctcataatttttggttaggtcaatatttagttaggtcaacattattatgcctccctacatgctattaaaagctttcttccttgtttttttccagagttgtctctctgtgtttgcaaagttttcaccaatttaaccacaagttctttgttagttgtctaaatcttccctcaagatgtccaatgcaacagctatttgaatcaattttatttctatcacagctttcttacctgctttgccagtccagactggttgctcttgatgtttgatgcacagctattaccttgggctctctcttcaccatcatttggggactgattcactttgcatctctgttatgctggctcctgtttcctatatcccacaccttagtcttttttgatttcttctatcattttgatggagcacattctccagtagctttctaagaaaaggtacatgtaaggtaaacagaattgaatatgtttttttccttgattgtgtatcacagaaaataattctccagatgtttttcccttaaaaactttgtcactaacaatataaaaataatttcttgttgtaaataattcaaatactacaaatagaaatccaaatagaaagttccctttctacccctcaactactccccctctgacccagaggtaatcaaactgttgatttggagcatattatttagatgtgcttttatatacgtatgtatgtatgtatgtatgtatgtatgtatgtatgtatatatgtatttatttttgagacagagtctcgctctgtctcccaggctggagtgcagtggcacgatctcagctcagtgcaagctccgcctgctgggttcacaccattctcctgcctcagcctcccgagtagctgggactacaggcacccgccaccacgcccggctcattttttgtatttttagtcgagacggggtttcacctgttatgcaggatggtcttgatttcttgacctcgtgatctgcccacctcagcctcccagagtgctgggattataggtgtgagccactgtgcctggccatacatatgtatttattattttgatttgtgcatttatttatttatttactttattttttgagatggagttttgctcttgttgcccaggctggagtgcaatggcacaatcttggctcaccacaacctctgcgtcccaggttcaagcgattctcctgcctcagcctcccaagtagctgggattacaggcatgtgccaccatgcccagctaattttgtacttttagtagagacagggtttctccatgttggtcaggatggtctcgaactcccgacctcaggtgatccacccacctcggccttccaaagtgctgggattacaggcatgagccactgcacccgatctatttattttaatttaattttattttattgagatggaatcttactatgttgcccacgctagtcttgaactcctgagctcaaaggatcctcttacctcaacctctcaagtatctgggattacaggcacatgacaccgtgcctggctttgcatgtgtttttaaataaattgaatcatattgtatatattgatctgtaacttgtttcacttaacagtagttcctgtagatttttccatgtcaatacacattagtgccttcttgaatagtatgttcagatgaactggagtgatcaagatcataggtatagcattttctcttcacaatcagtcacaaatactgaccgagtgttatgtgccaaactgtcttccagaatctgggaatatacagtgaataaaacttttatttttgagatagaaagggatagtgagatgcttctcgatgaaactgagctcagtttcagctttaatttggttttcctttcctagagtgcaaatatacaatcacatctctttttctcttggtataaaatcacaatcattaaaaattgagctaaatacctgttgtgccaccagaccaacagaacaataccactgacatagaaatagattttctggatggataaacaaaatatggcatatatacacaagggaatattattcagccttaaaatggagggaaattctgacacatgctacaacatggatgaaccttgaggacataatgctaagtaaaataaaccagtcacaaaaagataaatactgtatgattccacttatgaggcatctatagaaatcaaattcatacaaacaaaaagtggaattatggttggcagggctaggggaggggaaatgtttagttgtttaatgggtatagagtttcagtttttcgagatgaaaaagttctggagattggccgcacaacaatgtgaatatacttagcaaaactgagctacacacttaaaaatggttaggatggtaaattttacattatatattttaccacaattaaaacaaaaatggaaaaagagattctcacacagactcctttgtagtgggctttgtcttatactttgaataggtggttgaatctgctttcagctggatgaatactcagtagtgggaatgcaggattgaatggtaattccatttttagtttttggaggaacctccattactgttttccataacggctgtactaaattacattcctatcaacagtgtatgagggtctcctttctctgcatccttgccagtatttgttaatttttgtcttctttatgataaccattttaactggagcgagatgatatctcattgtggttttgatttgcattttactgctgattagtgatgttgagcatattttcatatgcatgttggctgtttgtatgtattcgtttgagaaacgttgattcatgtcctttgcccactcttcagtgggcttatttgttttgtgtttactgttgagttgtttgagttcttttaatattctggatattagtcccctgtcaaataaatagtttgcagatattttctccaactcaacagattgtctcttcattttgttgattgtttccttcactgtgcagaaactttttagtttaacatggtctcatttgtgtatttttgtttctcttttttctttttaaccaaccaagaagcactgaatcagttgtgtacttttgtttttgttgtctgtgcttatgaggtcttagctgcaaaatctttgcttagatcaatgtcctgaagtgtttccgttatattttcttctagtatctttatagttgaagtcttgcatttatgtctttaatgcatcttgagttgatttttgtatatggtgagagataggagttcagtttcattctgctgcatataaatatccagttttcccagcatgatttattgaagatgatgtcctgtaaccaatgtatgttcttgatgcctttgtcaaaattcagttagctgtaaaaatgtggaattacttctgtgttctctattttgttcaatggtctatgtgtctttttataccaatagcatgctgttttggttactatagctataagaatacttttgtacagtttccaaagttcctcttattattgatttctagttttactttatcttgtggtctgagaagatacatgatatgattttgatttttaaaaattagttgagatgtgttttgtgttttaccatatagtctattctggagaatgttccacatgctgataaaaatgtgtattctggaactgttggatgagatgttctgtcaatatttattaggtccatttggtctaaagtacaatttaaatattattttaattttctgtttagataatctgtgtaatgctgagagtggggtgttgaagtccccaaccgttactgtattggagtctatttgttctgtttgatcgaataatatttgctttatatattggggtgcatgctttgttaggtgcatatatgtttagaattgttatactttcttgctgaattgattgccttatataattataattatataattacattttttgtctcttttaactttttttttacttaaagtttgtttcatctgatataagtatagttatttatgcttgcgtttggtttctgtttgcgtggaatatctttttccattcctttactttcagtctatatctgtctttataggtgagatgagtttcttacaggtagcatatagttgggtcttttttttcaattaaaaaaatttttttgtagagatgggatctcgctacgttgaccaggctggtcttgaactcctggcctcaagtgatcctcccatttgggcctcccaaagtgctaggattacaggtgcaagctaccacgcccagccagggtcattgtttttttccaatccattcagccaatctatatgtgttaagtagaaaatttaatccatttagtttcacggttattattgatctgggagcacttattcttgccattttattaattgatgtctcgttgttttgtatatccttggttcttttctttctctcttattgtttatcattgtggtttggtggtattctgtagtggtaacatttaagcacttttacttccttatttgtgtgtttgtcctattagtgggttttatactttcgtgtattttcatgatggtagatactgtctttttgcttctatgtgcaggacttgctgaaacatttcttataggactggtttaatggtgatgaatttcttcagcttttgcttatctgggaaagacttcacttctcatttatttatgaaggataacattgctaggaatagtatccttggatggcagtgctttttttttcggtattttgaatatatcattgcattctctcctggcttgtaaagtttctattgagaaatttgctgttagtctgatggaggttcctgtataaatcactggacatttttcttttgctgtttttagaatttagaattctttcagtttgactataatgtgctctggaaaagatctttttgaattgtatctttctggcaatctctgagcttcctgtttccggacgtctacatctcttgctagacctgggaggttttcagttattatttcattaaataggttttctgttccttttgttttctcttcaccttccagagcaccaaaattttgaatatttggcttctttatggtgcctcatatgtcacatagactttattctttagattattttttctttatttttgtctgtgtcaggaaaaatcctcatttctcctctacttttacaccacaacaatcagcacagaggactcctgtgacaaatatgtgtgtgggagttttcccatcacatcaagcagcggatgccaggtaggtgtcttccaattcagttctgacactatctacctgaagatagtgccagatcacacaagttggggactcattccccaagactacatctgcctccttcagatggaacttctaactgactggcttcaagttggggttcccatgacctcctctttggatttcattaattttgctggggcggctcacagaacttagggaaacacatttgctggttaattataaaggatactacaaaggatatagatgaagagatgcacagggctaggtatgggggaagggttgcacagcttccatgcctccctgggcatatcacccttcaggaacctctatgtgttcagctatccaggaactcaccaaacctggtcctcttggatttttatggaagcttcatgatgtcaaaatttcttctcccagggtatagggtgggaccctctctgggaagggacttaaggcccacaatcagaaaggagcagaaagattagaatcctgcattgggccaggtataagaaaggcaggagacaaattctgtttcctcagaacttcccctgaggcctaacacacctgacattataacaaaagactcaaagaaaggatatgggagttattaacaaggaaccatgggtaaaaccctatatatatccatggttcctttatatatataaaatggttccttgttatatatatatgtatatatgtatataaatcatatatatataaatcatatacaaatatatgtatttaaatcattacaccacattgactgggttatttcatcacacttgttttcaggtgctcatattctttctgcttgattgagtctattgttgaagctttctaatatattttgtatttcattcagagaattctttaattctagaatttcttttggttcttttttaatgatatttatgtcttttgtcaatttttcatttgtatcctgaattttctgatttctttgtattgtattttcaagttctcttgtatctcactgagctttttaaataaaacttttttaaaattaaaaagaaattttttttgagatgaggtttcactctgttgccaaggctggattccagtggtacaatcatagctcaatggcagattgaactcctgaactcctgaggttgagtggtcctcctgcatcagcttctcaagtaactaagattacaggaatgagccaccacacctggctgagcttctttaatgtcattagtttgatttctttttcctgggttttatgaatttcttcattgaaatctattgctggagaattattatgttcctttggaggtatcatatttccttgctttttcatgtttctcgtgtccttacattgatatctgtgcatgtggcataaccattgcttcttccaatcttttgaatttgcttgcacgggggggattgtattctgaagacgtttatgtggcggtgtttaggtagggcactttggctttgattctgggtgtgtgcagtagtatagtctcgttatgatttcttcagctataaacagtgtcagtagtgtctgagatttgctcagtggcttcaggtgtgattgttagtggaggctttggtgaggttttgctggggatggggacataagatgggccagtccttgggccctagtggtgatagcagtgagctgaatgtgccagtctttgggcccttgggtggcatatgctgacactggtgttagtagggccaggtgagctgattcttgggcctgcaggtgactttcttgggtgctgtcagtggcaatggtgggaagggcaggcaggtgtgtccttgagcccctggacagtgggtgtggtgtgaatgatgacagtagcagtggtgagacaatcctctggttcccaagtgatccatgctggtgttgaaattgactgtgatggactaggtgggtcagtccccaggcctgcaggtggtgtgcgtgtgggtgccagctgtggtgttggtggcaggttgggtgagcccattctcaggtttctgggaggagagctcaggtgccaactgtggtgggtggggcaggtgatccctaggcccctggatggtgtgctccagcactgggtgggatggagttggacagggtgggcttctcctcaggcccctcatggtgcatgtagccactggctgtggtaggaggggtgaggtgatccccaggcccctggtggaatgcctgagttggagtggcagcggctgcattgtggccctgctgctggggagggcagagttgtttcagtggcagaagctgtaaacaggcagcaggggaaagctagcttggctccagctggtggctttaaatgaggctgcctttcctcagggcatttttaaatgtgtggtgaccccaatatggagcatggtggggtcactgccaatggctcatggtttggccctgtaggcagcagcaaacagtggaggtgggctgtgggcaggggatatcaatgggactccagggatatggagatgtggggctgttgggtcccaggataggatgcagtctggtggtggctggactctaaaaatggcaccttgctgtagctgcttagaattcatagtgtgcgtggaactcagtgtgagctccctccctggagcaatgccatcacatggtctccaggcagctccctgttagtctcagggcccactggagtccaggtgcttttttcctgtggctgcattgtatattatttgtccattaatcagttgatggatatttgtgttgtttctactttttgacaattatgaattatgctggtatgaacatttgtatacaagtttttgtatagacatgtgttttcatttcttttggggcgatacctaggagtggaatttctgggtcatatgataactcttgtgtttgtccttttgaggaagtgccagaatttgtttcaaagcaactgtattattttacataatcaccagcaatccatgataattccagtttctccctattttttgtattgtctgactttttgattatagccatcctagcgggtatgaagactgcatggttttgcatttcccttatgactaatgattttgagcatcttttcatgggtttattcgacatttgttctttggagaactatttagatcctttgtgtggcacttatttttgatccagtgcttcagattttcttccggaaaatgtgcacatccacacaaaagttagtatacagtttctaagggttcatgaccctcccagtatctgtaaaggcctgaggcttctcacatgctatgtggcagatgtttttcagggcgttttatatagttagtctcacccataattattatgtaccagatttgtgtgatgatcagatattcaggaaagtgactggccagccctaaaacactatagtgcttcagggattggtataagcacaagtgttgtgggtaagcgatagtaaagtgaagttgctaagggaatgaactcaagtcagactgcctgtatatgaatcctagtgtcacttttatgagctgttgtgttccttagggaaattactcagcctctctaagattcagtatcctctttcataaaatgagtttaataactgcacccaggtactcttgagcaatttaagtgagttaataaacaaaatgttttgcattgtccaggtgggcacacagaaagtgctgaataaattgttaccctggctgggtgcggtggctcacacctgtaatcccagcacttgggaggctgaggtgggtggatcacgtgaggtcaggagtttgagaccagcctgaccagcatgatgaaaccccgtctctactaaaaatatgaaatttgaccaggcatggtggcgcatgcctgtaattccaactacttgggaagctgaggcaagagaattgcttgaacctgagaggtggaggttgcagtgagctgtgatcatgccattgcattccagcctgggcgacaagagcgaaaatccatctccaaaaataagtaaataaataaattgttaccctgcagttaatattatatgacagaccaggttgacctttgaatatgaaaacatctttcttttcttggggaatgtagatatcttctattgatctttgaaagggccaagaagtttctgcaaattgaatcttgtaatcttctcaggaaagagaattatcttcttagataagcttaagtttacagggtactttacagatccttggcctgtttaagttaatcctttctaacctttgtcaccactgttagtgtctgctttagagggattttaaaacaaaagaaaacgtattttagcctttgtccttatctggcccagagaaacaaccttccaaataggcagtttttgctctttcaccccaaggtcaagcaagtagagagaatggggtccaaagtcctcaaattttaaaatctttctaaaattaactatcatttttaggacagccttaagaaaggcaaactaggagggaataatgaattgacataaggctttatagactgcatctttattattattattattatttttaattttttgaggtagagtcaagctctgtcgcccaggctggagtgcagtggcacgatcttggctcactgcaacctccacttcccaggtttgagcaattctcctgcctcagcctcctgagtagttgtaactataggcgtgcgccaccacgtctggctaatttttgtatttttagtagagacagggttttaccttgttggccaggctggtctcgaactcctgacctgaggtgatccacccacctcggtctcccaaactgctgggattacaggcgtgagtcaccacacccagccctccttcaagtttaatggaagggaagagttgctgtaaggtgcaggccaacatctctgaattccagtgttttatcagttttgttgtctgacctgcagatgatgatggtggttttaaaaattatttacttatttagtggcctgggtttgcaactggaagaggctaagataaaatattccttcttataatacaattacaggccaggcatggtggcttatgcctgtaatcccagcattttgggaggctgaggtgggcagatcacctgaggtcaggagtttgagaccagcctggccaatatggcgaaacttgtctctactaaaagtagcaaaaaaaaaaaaaattagctgggcatggtggtgcatgcctgtaatcccagctactgtggaggctgaggcaggagaatcacttgaactcgggaggtggaggttgcagtgagctaagattgcaccactacactctggcctgggtgacacagtgagacattgtctcaaaaaaaaaaaaaatacaattacaaaatgttatgagcatttgagtgacacattcttaaaaaaaaagaaaaagaaaaactgctttgcttttgtttaatccctcttttatgattgcctttttgggtcatttcaaagtctctttctatggataaaatatatttcttctcactttacaatatcagaagaaattaaatactgaagaagcatcttcagcatcaaaacccagtgaaaatggaaacctgttctggagttgcggtcctcagtgacttaaagaaaggcattatatgggtaactgtgctctcctttccttcctgaattgcactgaaagtacaggcagtctctaaacaacaacgctggaacttttaatatcatgtgttccagcaagaaagagaagttgggaaatttcagcctagcagatgatagtgtcctatctgtcaacctctgttaactcataagattcttggtatcccactgacagacttctgagtctcaatttcctggacaactctaattcttgttttttttttttttttgtttttaagacagattctcactctgtcacccaggctggagtgcagtggcacaatctcagctaatggcaatctctgcctcctaggttcaagtgattcttctcactctgccttctgagtagctggaattacaggcatgtaccaccatgcccggctaatttttgtatttttagtagaggcagggtttctccatgttgtccaggctggtcttgaacccctgacctcaggtgatctgcctgcctcagcctcccaacgtgctagcattacagttgtgagccaccatgcccagcctggactgccctaattctattaaaacatctttttcctcctaaaaattttaggggaatcagttattttgaatgtgagggttttttttttctgaataaaaaacttgtctgtaccctaccctaaatctttaagttacaataaaagtctcaaagatttttaagatcttttaaattaaaagatttttttctgttaaaaagttaaaaattctaaatgttaagataaaaaatctttataatttaagatgagtccctcaaagattaaaataagaatcttaaggtaaatgatttaggggaggggatattcttaattgataattgttggaaatctcttagaaaagagtctcccgaaattgcatcctgtggaaacaagtctgtaatatcctcagagaaaatccttgatcaaatatattttgggaaacagacagtgtttcccttctggacaatcataattctcgtatgtgcttatacagccacaaaacattttcctttccaattttagtatatgtgctgcccaggaaagcacattttgtttttcttccatgaaatacagtatcttcttcaggctgtacttcagacagttccctgtctttggagacatagagtacagtgggtctaactaggtcatgatagtacagtgcaggggataagcacagaaggctcaggctgagagagcatggggaaggaggtcctcattcagacttgagagtttccagaagttttctaggaggcatgatgtctaagttggcggagaaaggaagggagtggagagtattctaggtggagagaacagtgtgtagagaatacctgtaggtgaattcagacagttcaaaatggctcagtatatttagaatgtagagatggaggcagggaggggcaagagatcaggtaggagctggagcacccaagatgtggcaggcaatgctctgtaaagcgtgtgaagaactttacaactttatcttgagaataatgacgagcccttggaaggttttatgtgataatgacttgttcactttatttattttaaaagattataagctttattatagagaatggattgaagagaaaattagaggtagaaaggcctgggaggcaatgtaggcaaaagtttatggtgactttaactagggcagtggcaatatagatgcagagaggtaggcagatacaagagatgtttaagagatagaatcaggttccgcgcagtggctcacgcctgtaattccagcactttgagaggctgaggctggcagatcacttgaggtcaggagtttgaaatcagcctggccaagacagggaaaccctgtctctacaaaacatgtacacacgtgcgcgcatgcacacacacacacacacacacacaaaatttgctgggcgcggtggtgtgcacctgtggtcccagctacttgggaggataaggcaggagaattgcttgagcattgcgaggcggaggttgcagtaagccaagattgtgccactgcactccagcttgggcacaggaatgagaaaccctgtctcaaaaagagctcacaggcatggcagctcatgcctgcaaccccagctacttgggaggctgcagtgggaggattgcttgaggccaggggtttgagaccagcctggccaacaaagcaagatcccatctcagtgtattccttaatgcttaaaaattgctactgttggctgagtgtggtggctcatgcctgtaattccagcactttgggaggacaaggcaggatgattgcttgaggccaggagttcaaggctaccctggccaacataacaagaccctgtcactatttttaaaaagttgcagccaggcatggtggctgacacctgtaatcctagcactttaggaggccggggcaggtggatcacttgaggtcaggagtttgagaccagcctggccaacatagtgaaactctgtctctactaaaaatacaaaaattagctgggcatggtggcacacaccagtaatcccagctactcaggaggctgaggcaggagaattgctggaacccaggaggcagaggttgcagtgagccgagattgtgccacttcactccagtctgggcaaaagagcaaaactctgtctcaaaaaaaaaaaaaaaagttactactgagttgggtatggtcgcacatgcttgtaatcctagatactcgggaggtgagggtgggaggactgcttgagcccaagagttcaaggccaacctgggcaatatagtgagaccccctctcaaaaaaaaagttgctcgtaagtcatctattgtgcttataaattggtacctctctatggaggggaatgtggaaatctgagttgacttagaaattttacttgcaggtgtatattctgaagatctacatgaacatgaaagctatgctgtatgtatgttgtgtaagatgaaaaataacatatatatacatgaccaggtgcttagctaagtcaattatgggacttccatattagggaatactggtcagcctcataaaatgaagcaattctatatataaggttattacatatcattattaatcagaaaaaaaacaaggtgcagaacagcatgtataatttgcctatatctatgtaagaattttttgggggatatacctgtaaacacattgactatctttagaggaatgcacaacaaactgtaatagaggttaacttttgagagggaaactggatggctggggaacaggggtgggagggaaatttaacttttccctgtatcacctgatgtacttcccggattttataccatttgcaatattatctattagaaaaaaattgccaggagctggtttagcatatcccatggatgatacagtgaggacttagataagaactaagtgcagctttgtcacagttataacattgtaactatctgttttggttgttttttgctatgtggcaatttaggcacacagttatagagggtttacttgaagctattgtaattattattattttttaaaaatagaagtggaatgcctatttcttttcttttctttttcttttcttttctttttttttgagacggagtatctctctgtcacctaggctggagtgccgtggcactatcttggctcactgcaacctcccaaattcaagcctcccgaattcaagcaagtctcctgcctcagcctcctgagtagctgggattacaggcacacaccaccacacccagctaatttttgtatttttagtagagatggggtttcaccatgttggccaggcttgtcttgaactcctgacctcaggtgatccacccacctcggcctcccaaagtgcagggattacaggcgtgagccactgcgcccagcccgtggagtgcctatttctaagtgcagctaaaggaatgttcatgaaactttatagctggacagctggaaattaacaattcctggggtcactcacccagggagaacaagatttctctagtttgctggtagagattacctacaggctacagaagaaaacagtgttatcttgtttttcctccctttcttttttcctttcattatagcttgacatgatttattgaatgcccatgatccccagttacatttactcttatcctttatcccaaactcctattcccttagtgtagatgtctgcagacccacgtattcaaaggtacatgtttttaggttattagcttattagggaaattcctgcaatgctgtgtttcaggaatattatattccccatggggcatccaatgagatactgtaggtgtatcctaggtatttaattgaattcattattttttcaactattttaaatttagcagatactttggtgagagaggatttcatatgctttgtgatccgtagaacctactttgggaaatgtcctatactgtgctgctatactgggaagtgtgggtaataaaaagggggtctgtgaatgcacatgggtgtttcctaccatcctttctctctgggtaagaggggcaaaaataaatgctgaagttggcaacctccagagctaaacaggctatcagtttctatagaacatggataataaggtcttgggcaaatttaccaagaaggaaaatttgtcattctttctgatatctatcagagatataagattacttcaaggcagagccttcctcttcagctgtccataccatttccttccttccttccctccccaccgctctccgagatctctacagtcatttccattcgctcattgcatcttcattctctctctttttgttgacttctcccttagtctacaaagtcctgttttctcaacataaaataaactgtgcctataaaatgtcatgtaaaagatctctggcactagcattagaacctgctccttctcggtgaagagggaataaatagtactgtgatgagccacagaattgtgaatattgctttagctaaagcacctaagacatttagccctcccagcctttggcagatacgacagactactttagtgttggcttttgctttatatcgtccatttatgacagtttcttttttttttttttttgagatggagtctcgctctgttgcccaggctggagtgcagtggcgttacctccgcctcctgggttcaagtgattctcctgcctcagcttcccgagtagctgggactacaggtgcgtgccaccatgcctggctaattttttgtatttttagtagtgacggggtttcaccatgttagtcaggatggtctcgatctcctgaccttgtgatctgcctgcctcggcctcccaaagtgctgggattacaggccggccctgactgttgtttttagtattgcttctcccaagagaatcttacactaactacctatctcctctgttttacaacctttttcctgaatctcttgaaattgatttgttcatcgtggacaaaattgccattcttcttatcttctttttagtattaagtatgtcttatcagtttttctttgaaattttctactttgataatgatgcaaacattttactaaactgagaaactgtctcccttccctaattcaggtatcaaaccaccatcctggctagtaagtctctattctctatcccccaaactctttcttctgcatccttgtttagatgtttctgaaagttcttgaccctttgatcgtctctattatctgtccttcagtgacctcatggcttttgtcatcaccttaaagtgaacctcttctaaattttcctctaggctgaaatctccacgtttctaaccaccatggacaccctcgccaccttttaaaacctttgttgtctttcaagaactttcataaattccatgtcttccatgaaaacatctcaagtatctacaggcagaaggaatttctccttcactagtgtcctgttgcctacgattgtaacatttatgacccacttccttacttagtatccatttgttaacataagtgcttctcatttgctggtggcatttgggacactttttattttattttattttattttattttttgagatggagtctcgctctgtcgaccaggctggagtgcagtggcatgatctcagctcactgcaacctccacctcctgggttcaaatgattctcctgcctcagcctcccgagtagctgggattacaggcatgcaccaccatgcccagctaatttttgtattttcagtagagatggggtttcatcatgttggccaggctggtctcaaactcctgacctcaggtgatccacctgcctcggcctccctaagtgttgggattacaggcgtgagccaccacacccggcgggacacttttttgttttatttattttaattagaataacatgaggtgtcaaagttttttttttttttgcggagtctcgctctgtcaggctggagtacaggggtgcaatctcagcctactgcaacctctgtctcccggattcaagtgattctcctgcctcagcctcctgagtagctgggattacaggcctgtgccaccatgcccagctaattttttttgtttttaatagagttggggtttcgccatgttggccaggctggtctggaactcctgacctcacgtgaccctgtgcatcggcctcccaaagtgctgggattacaggcgtgagccactgcgtctggccatcaaagtatttttttttaaatgaatgaataaacctattattcttagaggtatcaatttttcttttcatttgtttcttcctttcgaggtttcaatgttttaaaagaggtggataaactgataggatgtatcctgcctatggattgtaaagggctggttccacacttcgcaagcttcccaaggtcactgaatttaacgacatcttctggagggtgggtgtggtaggcattaaagttggctgtaagtttagaaattgaatgcattccaaactacccttgaaaagtccctttcattgagcataaaatacagtacatgaagattttatcttgtgttggaactttcttcagttgagtaccagattaaacaggggatctagaatctactcattaagatgaggtatgcagactaagatatgcatgtgggaactgagaccatctggggaatggtatattcttgctctcacagactccactctagtgtctacacacagtcacttgtgtgcagtagttctctgtatgtggtccaaggactcctagaggtctctaagaccttttcagagggtcctcagagtcaaaattattttcataatggtactaagatgctatttgcccttttgacatattttctcatgagtgtacagtggagttttcccaagggtacatgatgaatacacaatgatctaaaaaggccattaaaatactctcccttttcaactacatgtctctgtgaggcagattttctttgtatacttcaagcaaaaccacttattgcaaaggattgagtgcagaagcaaacatgagaatttagccatctttagccagacatgaaagagatttgcaaaaacataagacagtgctctgtttatgaacttttttggaaaatttttgtgttagcatgtaacaggttaaaatgaactaataagtaaatatttttaaatgtctcagttttaatttcatatgtggtaaatattggtagacataatttaaataaacaaaatactttttggagtacttggtagtttttatgattatgaaaggatcctaagctcaagaagtttcagaactgctgcttttggaaataagatactcctgaggctggatgcggtggctcacgcctgtaatccctgcactttgggagactgaggtgggtgtatcacctgaggtcaggagttcaagaccagcctggccaacatggtaaaaccctgtctctactgaaaatacaaaattagccgggtgtggtggggcatgcctgtaatcccagctactcaagaggctgaggcaggagaatcgcttgaatctgggaggttgaggttgcagtgagccgagatcacgccattgcactctagcctgggcaacaagagtgaaactctgtctcaaaaacaaaaaaacaaaaaacaaaaaacccccccaaaaaaatcaaacctactgatagtggaatgacagtgaaactgcccacactattaaaactgtttttctctctgtcttatttttcaccttctagccttctctcattcttttagcaaagcttttgaatttgtctaagttacacacgtggtatgagtgtcccccaaattttaaggagcaaaatccagttgtgtcttctttgtgctgtgctatactgaaaaaaataagacaaataatctccattgtctatataaaccttactatgaatgtcataaataaaatttaacctgtaacttctttttaaaaatgtttctattttttatattattggacgtagacacggggtctcgatatgttgcccaggctggccttgatctcctgggctcaatgattctctagccatggcctcccaaagtgctgggattctaggcgtgagccaccatgcctggccaaacatgtaacttctaataaaggctttattgtctgagaggttggtaagtttcctaaaagtcaattatttaacagtatattttccccagtcatggtggtacatatctgtagtcccagattctcagggggctgaggcaggaatatcacttgatcctaggagttcaaggccacagtgtgctgtgatcacgcctgtgaatagccactgcacttcagcctgggcaacatagcaagactctgtattaaaacaaaaataaaagcatagtttcatgagccactccaaaaaagactttattttaggtcatgtagtttatttgcatgtagtactagtaaagttttggataatttaacaagatatttggagcataaatgaagaccatctgtgtacatagataacaaatttgtgagcattttggagcttggaaattggagagaattgagtgcatgtaggtggaaaatctaaccagattagagtggttgtactacaaataggcccagcatttggttaaatctctgtattttactatcgagggacagttgtaaagtacactcataaaggagacttccatttcctcttccctttttatcagaatgatttaacaagatctgaaattataaatgtttcatttgcatgttttattccccaggagactggttaaaccctgaagcgtgagtgacaactgaggaaaaggatgtctttcgctgctattttgaaattgggttttggggctgaaataatgagggcttcaaccaatttggaaagaggaaggaaggggtatgatatcacttcacttttcacctttctgatgcactttacttggaaggttactgttgagttcctctaatcccctatttggctccaggaagatttataaatgttttactccttaactcttgagtttatataatctagaaattcattctgacgttccattttttttttttttttgagagggaatttctctctcattgcccaggctggagtgcagtggcacgatctcagcccactgcaacttccacctcctgggttcaagcgattctcttgcctcagcctcctgagtagctgggattacaggcgcccacgactgcgcgtggctaattttttgtatttttagtagagacagggtttcatcatgttggccaggctggtctcgaactcctgacctcaggtgatccacccacctcagcctcccaaagtacagggattcaggcatgagccactgcaccaggcctcattccaaggttctaaatgcctttgcttagcaaagcactatgtgaaaatgttagtaaaatttctcaactactcaggagaaatggcgttttagggaattgtgaattatttagttgacattcaatttttagagatgttaccaaaaataaattactaccagctaaatagtgctcaccttttaccaccaaagtgagatgaaggtgtaaggttactttgtgttctctgcctcctggacagactatttagtggaaaatcagtcaacacactttctggtagtgttggtggaacaggaacttggtttttagatatttttagcctggatgctgtttttctgagactgcccctctcggatcaagtgtcaggtaggtatccttgcagaatttggacagatagaaggccctgagctgacacttgaaagtggatgggctggctttgcactgatggattccctgagccaacagattgattgatggtacatcctgatgtccatctacctggcactttgaagggattcttgcttcaagggaggcactctgaagaaaaaataacaaatgttgatctggagtctgaaaatattgtctatttgacccattctagtgttgtgaattccaagataaataaaataatgctctcttttgaagtggattacaataaggttaagagagagagagagatggtccagtgaatgcaagtaaacattgttagtgctgtgatgtgtgtaagagagaatgcaggaaatcaaaatcggagtcagttatcagttccactgaagaagtagttgttagatgatagattttttttaaggtgcaaaaaagttgtagaaagaaaacaaatgacctgttatctttgtctccctttacctccaatcatgcaaacttgtggatgtttttttaaaaaaaaaaaggttgccgggcgcggtggctcatgcctgtaatcccagcactttgggaggccgagttgggcggataacaaggtcaggagttcgagaccaccctggctaacacggtgaaaccccatctctaccaaaaatacaaaaaaaaattagccgggcgtaggtggtgcatgcctgtagtcccagctactcaggaggctgaggcaggagaatggcgtaaaacccgggaggcggagctcgcagtgagccgagatcgcgccattgcactccagcctgggagacagagcgagactccgtctcaaaaaaaaagtcacttttttgaagattaaggaacatctgtgaaattatgccttctcagagagtaccccaagataatttatctgggaaccctaaaaagccataaagtggaaatacagtttgaacatccctactctgaaaatctgaaatgtgaaatgctctaaaatctgaaactttttgagtgccataagcgggaaatttcacatctgacttcatgtggcaggtggcagttgaaatgcagttaaaactttgtttcagtcatgcacagtggctcacgcctgtaatcctagcactttgggaggccgaggcgggtggatcacttgaggtcaggagtttgagaccagcctggccaacatggtgaaaccccatctctactaaaaatacaaaaattagctcgatgtggtggcaggaacctgtaatcccagctacttgggagactgaggcaggagaatcacttgaacctgggaggcagaggttgcagtgagccgagatcgtgccattgcactccagtctgggcaacgagagaaactccgtctcaaaaaaacaaaacaaaaccaaacaaaaaacaaaacaaaacaaaaaaactttgtttcatgcataaaactatttatttatttatttagagacagagtcctgttctgtcacccaggctggagtgcagtggcatgatctcggctcactgcaacctctgcctcctgggttcaagtgattctcatgcctcagcctcctgagtaactgggactataggcgcccgacaccacgtcagctaatttttgtatctttagtagagatggggttttgccatgttgtccaggctggtctcgaactcctgacctcaagtgacttgctcgccttggcctcccaaagtgccgggattacaggcgtgagccaccacacccggacaattttatgtataaatttttaaaaaatattgtgtaaaattaccttttgtctgtgcatataagatgtatatgaaacataaatgaatttcacattcagacttggatccctccccaaggtatctcactatgttagtctgtgaacatttctttgcaattccccagcctgacctcaggccaaagattagatataaaatctgattatgttttaggatgacacaaattgagaccaacacaccatttcccttctttctcctttgcctttccctcccctaaattacaacaattaaaaagcaaaaaacatccagtcgatgaagactgccatgatagctgcagaaatgtcaaaatccttactctcaactaccacgaccacaacaaatttgctgctctagtggcagaagctagcacacttggtgtttgtcctatcagaaccaacaaacatttggttctctgttgaactgaacatggaggcctctcggaagtgtgctggagagtatattgcaaaggaactattacgaggttggcagggtgggaagtaaagttctaaattgagaattatttgaaacattttcaagctaaaggctgctttttttttttttttttttttctggtagttttgagataagataaccggagttgaaggaggaaagtttccacattcttgttatgacacgggcttcctgtttacacctttggagggaaaatagtatacatgggttcctgaagttctattttcagcatgtttgttgctcattcaacaatcattgggttaggccctggggcaatagaaatgactggcatggggcctataggagttggagtccagggaagatgtgagcctgtaaaggtcattaaatcatagtatgagaggaactgtgagggaaatttggaggtcaggaggcattattctatgaaaaaaaaaatacatcaaagttaagttcccagaccattaacccaaagccagtttttacttttaatattgctagtaataatacctgagctttattcagacttaataagtcccaggaagaattctaaacctttatctaatcctttcaatagttctatgaggtactattattatccccattttgatagacaaacaggcatgaagaaatcgaataatttgttcaggtagtcctactacaaagctgccattcagcattttgaaagaagtgaatggttgagcacagcttgcctattttgtctatacaggcttctacattagatacccttttagcatctgtttttaatagttaattggccttgaacttgtcccagaggcatgaaaaatacaaaaaattaaaaaaatagttaattggtgcacataaagtttaatgatatcagtttcttatctgtttcctcctttttattctaacttccttgagagcaggaactttgtctcgtttgcaatagaagtcccagcatgcagcgtgggggcctattcaaaatatttgttgaatgaattcatagattcaggtattttgaaattcagaatgaagaattctttgaggacatactgactttttgtaacatgtttgtcagtgctttgcaaaaattaggtatttaataaatgtttggagaatgaataaatgaaattgttaacgtttttgaataggggacagggctgactgattcaaaaagatagtgtcatttctttctttctttctttcttttttttgtgacaaggtctcactctgtcgcccaggctagagtgcagtggcacaatcatggctcactgcagcctcgacttccttgggcttaagcaatcctcccacctcagccttctgggttgctgggaattataggcacatgccaccatgcacggctgtttttattcctgtattttgtagagacagggtttcaccatgttgcccaggctggtctggaagtcctgggctcaagtgatccacctgcctcggcctcacaaagtgctgggattacaggtgttggccactgcgctcagccggattgtgtcatttcttattgaaatatagattttgaattccctgttcatttagttccttttaagttctgtgattctgggttgggtgtggtggctcatgcctgttatcccagcactttgggaggccaaggcaagcagacaacttgagttcaggagtttgagaccagtctgaccaacgtggtgaaaccctgttgctactaaaaatacaaaaattagccaggcatgctggtgcatgcctatcatcccacctactcaggaggctgaggcaggagaatcgcttgaaacctagaggcagtggtttcagtgagccgagattgcgccagattgcagtgagccaggctggaatgcctgggcaacagagcaagactccgtctcaaaaaaaataaaaaaataaaaataaataaataaataaataattacattgtatgactgggttttcccaagttttttagtgttttgccaatttagtgaatgtcttttaatacatagaaaatgctgctgagcatgcaaaaagaataagagagtaaaatgatttaagatgactctggccttgatctgggaagttttccttgtttataggtaagatttaaatacacaggaacccatcaactaatctctgtttttctcctttctattttacttaaaaaagtctggacttccattatctacagttctgttcagtgatgaacacttacgtttaggattggtgcatgttggacaagatccactgagctttttttgaggatagtgtgataatgaggtaccacagctggatttgtagcatattttctggcccagtgcatttccttccacagtagaatgggagtagatatgagtgaggtggggactgcactgacgtggagtttgaaaaagctcccttttagaaagccttcctttcatctctgttctaatatctatgtgtgtataaagtaatatggacacatattcttttttttttttttttgagacagagtctcgctctgccacccaggccagagtgcagtggtgcaatctcggctcactgcaatctctgcctgccaggttcaagcgattctcatgcctcagcctcctgagtagctgggattatagttgcctgccaccatgcccagctaattttttgtatttttagtagagacggggtttcaccatgatggccaggctggtctcgaactcctgacttcaagtggtccacccgccttggcctcccaaagtgttgggattacaggcatgagccaccacgcccagctaggacacgtattcttataccatttacagccaaaatatttttatattagaactactcacaagtagctgggatgtatagtccatccagtgtcctctgccactggacttgtaatatagcttatggaggagcttggctatgatatggattctgtagaatgggagagagtttattaggaggaagagtgagtatcaacatctcacttggatttagggacagttctaggctgtgcaacctgaaacaacacacccaatggtaaaactatgcttgcagaatgtgtatcgaatcttgctgagtcacatctcttctctgacactctttccagcttcctgtgaaatcttagccaaagtgggacttgatgggtaaaaattttgaagtttcgggagcttggtatttattccataggattatggtacaagatataaaagtgacttttggcagatttaagaggatatatcagttacatctttacttccttgctaggggtttgttcatgtagggcttttgttactcaaagtgagattatgggcatattcactttgcgtgtcgtttaatgttcacatttggcttatttgtgcctatgttatctgtaatagaaactggtaaatgcttagcctgtgtggggttggtcttggcattttaattagcattcatgatacttgagtatttcttacctgcaggaactactatggttacattgttttgtcacataattagagtataaaataatgacactttctttttagtcccagaaatcctggattaaaggagtatttgacaagagagaatgtagcacaatcatacccagctcaaaaaatcctcacaggtaaaattttcaattaccttcttcttttaaaagcaacactacctgatggactatttatagaaacttagaaatatgacttgtttagaagttttgatcatatctataaagttagaattttcaatgtttatttctttcactttataaaaataatacatgattattgtagaaaatctgggaagaacagggaccttgtccatttttaccttactcttactccagtgtctgtgacagtgcctgccacatagtaggctcttgataaatatctgtgtttttgtttttttgagacgaagtctcgctcttgtcctccaggctggagtgcagtggcgcaatctcagctcactgcaacctccacctcctgggttcaagtgattctcctgcctcaacctcccgagtagctgggattacaggcacctgccaccacgtccggctaattttagtatttttagtagagacagggtttcaccgtgttagccaggatggtctcaatctcctgacctcgtgatccacccacctcggcctcccaaagtgctgggattacaggcgtgagccaccgagcgataaatatctgtttaaggaatttaatgaagtacaaagaagttattcttaatgccgtcactgttaatattgtcgtggatttcattctacttgattcttctgttcctcttgatgggaggatagacgttacagaaatatctagtgttacatccatttcagtgggttggaatcaataaattacattttctgaatactgaatattcaaaatattgtgaatgtttcttatccccaactaaagtatctgtggaaaatagtgactggtatatttaagtacactgtgcccagattagatgaacaggtaatttcagttccgttttccttccatagactttatttttatggaatgctttatgaatttgcatgtcatccttgagcaggggccatgctaatcttctctgtatcattccaattttaatatgtgtgctaccgaagtgagcgcccataggcttttggattgagcagataatcggtagcagaatggaataatttgagtttgactactgagttcttgacaatgctttggaagctctacttgtaaaacaaaggtcaaaaaagcaactagtgaaagataggggaagaaagggctatggaaaattcctctgggtaatcaggtctgtgaaattaagattgacattgcccttggaaaaattaattaaaaggaaaatagaagagtaatattttaagtaaaggaaccaacctatttttagatttttttgggcatttgtccttatatgcctttaaggtttagaactcataactatgtgttatgaagggtagcaaggtaaggtttttgaaattctagttctttggagatgactgaaatagtgttctttgcctttgttaaatatttactagtcccacccttattgaattacctatgatttgtaagtcttgtgattggaaattctctttttacctgcttaagaaaggtttatagtatgccaagataaccttgtttttccccttcattttttatgacatcatgtggtggtgactgcaatggaatgcaagttgattcaggtggctcattttgtgtctgtgaataaaaaaatcatttttacaataatcttgaatctcaaaaaaaaagtgatgaaattactgagtcttttactagcccatagactcaagaagagtatcaacgattgtaattccatgaatgttccaaggcatgatgtacttttagcaagtgaaaaaactgtctctatattgtgggattgtagataaaagttaaggtatgattatggctatttcttctagccagccttttttttagatcctagtaaaattctcagaattgaggcttttttgcagttttcttcattattggtgcacaggaagtgggtgataattcactttttaaaatatcgataaaagtttgttttattatttttgtagctcccaataagaaacaaatctgatacacttgattataacatctttttccttctcattttcaatttactgttgaaggaaagcttctgagaaaaggcattcccaaaaggctgggacaggaagaaataaaagtcctgaatattagtttctgaataacttagagcggcccttattttaggaacattaccttttcttccattattttaactagacttccctgttaatacttcttcacacacacacacacacacacagacacacacacacacacacacatattttgagacaggatcttgctgtgtcccccacgttgcagtacagtggcatgatcttggcttactgaagcctcgacctcctggactcaaacaaccctcccatcttagcctcccaagtagctgggaccacaggcacatatcagcacacagggctaattttttgaatttttataagagtcaaggtctcattatgttgcccaggctagtcttggactcctgaactcaagcaatcctctcacctcagcctcacaaagtgctgggattacaggcataagccactgtgcctggcccaaaaatataactgatgacaacagtgctaacccctaaatctataaggttcttctgaataataaaaaagaaagattaataaaggataatttgtaattataccaaatgtcccttatttgatagtgctttatggttttaaagtggtttacatatatctattttcttgattctcaagaaatctgtgttatcttcatagtttaataataatagtagctaccattattgtacacactgtctttaccaggtaccataagacacattacatattattatctctgataattattttaataaccttatgaagcagatattattttcagatataaaaactggggcttagagtaattgttaaatcaatgagatttaaattgaggtattttggttctaaactgaatgttgtattaattagatcacagttgctgcagtaattatatgtggtaaatgccataatggaatatttggaacatgatatatgaatttcagcaaaccttgatttctagatcatggaaaataatagatatttactgtacaagcattaaatgtattttcagatacaccaacaaactaacagaggttttatttctttaatttagatgtactccagtatgccaagtctgccagaatttaatcaggtaagacttagataagcaagattccttttagcttttaggcaccctatttaaaattcactgggacagtttcctcatatcttgaatgtactcagtaaatggtgcatgccatttacctttccaagggaagttttaaaaagatgtttttgatggagagtgagtattcgaacgtaatagactacttgaattactgagacatgtaaattggctaagggccttcgacaagaatttctaccaagggaaacacttgtaaagcattacattttagttttatgatcacatttggataatgaagatgctgcatgcgcatacgggactgtaattgatgtatgaattgcaggtgccttgtatgcatactaagcttatgggcaaaaagctgtttagtgcaatacaaattttaacagtgatttgcattttaaactatgtgaccgtttttacctttctcttttgtaagtagaaggaaatgaaattttcttaattctgatcatagcctgaagtttatataatggattgaaccaaagttaaatttattcttggaaaaaaacatttgggactaggcacagtcactcacacctgttatcccaggattctgggaggccaaggtggatggactgcttgagctctgatttgaggccagtttggacaacatggtaaaaccctgtctcgacgtacaaaagcaaaaacaaaacccaaaaaattgtagcgggacttgttggtgtgtgcctgtatactcagctacttggaaagctgaggtgagaggattgcttgaacttgggaggtcaaggcttcagtgagctgtgattacgccactgcactcccacctgggtggcagagtgagaccctgtctcaaataaaaaataaaataaaataaaaaattggaaccctcagtttagcaaatcatggggagaggaaaccagcatccacagatatggaacgagaagaaggaggaggttgctggaggaagaatttctacttggctgacctctcactttttcctcaatttttttctttccttttagtaattatttaaaattttgctcttagcttggtgcaaacgtaattgcggtgtttgctactgaaagtaatggtgaagaccacaattaattttgcataaacctaataaaatgcaaagcaaaataagaatataataaaaagaaaagacctcatatattctacctagtttctactatattctttagaaactctccttctcaatgtcctccaaaatctcaaccccacaaccttcagagacaactaacgtgaacatattggaaaagcatctacttttatacctctcagaaattaaaaatggttaaaaactagtcatttttgcacatagatgagactagttttatttttttgatagggagagccaaatgtcctaatacgagttactgagcagtctctcctagtctcactcatttctgatgctgtctgtgttatataccacatttccatccatctatggctttgtttctgagctttcttttcagtattttgatctacttctatgcttgtcaaatgccactctgtttcattattatagttttgtaatatatgtcttgatatctgatagggtaagtttcctatactttatttatcttttaaaaattgtttttacttttcaaaacacttttatgcatttattttattttattttatttttttagtatttattgatcattcttgggtgtttctcggagagggggatttggcagggtcataggacaatagtggagggaagctcagcagataaacatgtgaacaagggtctctggttttcctaggcagaggaccctgcggccttccgcagtgtttgtgtccctgggtacttgagattagggagtggcgatgactcttaacgagcatgctgccttcaagcatctgtttaaaaaagcacatcttgcaccgcccttaatccatttaaccctgagtggacacagcacatgtttcagagagcacagggttgggggtaaggttatagattaacagcatcccaaggcagaagaatttttcttagtacagaacaaaatggagtctcctatgtctacttatttccgcacagacacggtaacaatctgatttctcttccttttccccacatttccccctttttctatttgacaaaaccgccatcgtcatcatggcccgccctcaatgagctgttgggtacacctcccagacggggtggcagccgggcagaggcgccccccaacctcccggatggggcggctgccgggcggagacgctcctcacttccctgacggggcggctgccgggcggaggggctcctcacttccccgatggggcggctgccgggcggaggggcttctcacttctcagacggggcggccgggcagagacgctgctcacctcccagatggggtggcggtcgagcagagacactcctcagttcccagacggggtcgcggccgggcagaggcgctcctcacatcccagacggggcggcggggcagaggcgctccccacatctcagacgacggggggccgggcagagacgctcctcacttcccagactgggcggccaggcagagaggctcctcacatcccagacgatgggcggccaagcagagatgctcctcacttcccagacggggtggctgctgggcagaggctgcaatctcggcactttgggaggccaaagcaggtggctgggaggtggaggttgtagcgagccgagatcacaccactgcactccagcctgggcaacattgagcactgagtgagcgagactccgtctgcaatcccggcacctcgggaggccgaggcgggcagatcactcgcggtcaggagctggagacaagtccggccaacactgcgaaaccccgtctccaccaaaaaatacaaaaaccagtcaggcgtggcggcgcgcgcctgcaatcccaggcactcggcaggctgaggcaggagaatcaggcagggaggttgcagtgagccgagatggtggcggcacagtccgccttggctaggcatcagagggagaccgtggagagagggggagagggagaccatggagacggagacggagagggagagggagagggagagggagagggaggagggggagcgggagagggagcgggagagggagcgggagcgggacacttttatgcatttatacaattttttttttttattgaaagaaaattttagctaagtgtggtgggcacatgcttgtagtcctagctactcaggagattgaggctgggggatagcttgagccaaggagttcacattcagcctgggcaacgcagcaagatcctgtctcaaaaagaaaaagaaaaagtaaacattttctttaaaatagtatgttttaaaaagtagttccgctacattgcaatactatcattaaaaaaaaaaattctaatttttaaaagcaaggtcttgctctttctcccaggctgaagtgcggtggtacagtcatagctcattgcaacctcaaactcttgggttcaagtgatccccactcttcagcctcctgagtagctacccccctcctggcatgtaccactgtgtctggctgattttttttgttttttattttttatagagatgggttcttgctatgttgcccaggctgttctagaactcctggccttgagtgatcctcctgcctcggcctcccaaagtgctgggagccaccgcacctggactatattgcaatacttaaaaataatcctaaatctccttgtcaataagtgactgtaatatatatattatatatatatgtattatatatatatattttttttttttttttgagacaaagtctagctctgtcacccaagctggagcgcagtggcgcaatcttggctcaccacaacctccacctcccaggttcaagcgattctcgtgcctcagcctcccgagtagctgggattacaggcgcccaccaccacgcctggctaatttgttgtatttttagcagagatggggtttcaccatgttggtcagtgtgattttgaactcccgaccttaaatgttccgccgtcctcagcctcccaaagtgctgggattacaggcgtgaaccactgtgcccagctgatttaatataaattttagaatcaccttgtcatgttccctgaaaaatattttgagattttgatttttttttctttttaaatttattttattctttgtttctaacatggctgtgaaatgctctgagtgatgggtattttactgaatttataaaacaatttgagagggaattgacattttttttaacccccctcctggaattgacatttatataaagtgagcttttagtacttgttagtgatatgttctttgagacttcaaaagttgtaattaaagagacaaacatgaatatatattttttaattttggaggtctgtttcttctatgggaccttgctacaatttaatgaactagaaaaaaaaagaataaaatgtcaactcaaatcaaatagataatcagaatagaaatatacttaagctgaacgttggtttgcactaaagaactgccttataaaagcataatgagttatctctccagatgaggttacctcaatttatgttttgtgtagaaaaagccaggcagatgaatcattatttgtcttgtgtttgaatagatgctgcttcattttgaagggtgacccttgttccaaaagatgatcagatgacaccattctaactagtagatcctgattatgtatattcggtacatttgggattactgtgcctccctttacattaagaacctttccatatggaaccccaatattcttactttgccttttttttgtttgtttttttgtttttttttgagacgaagttttgctcttgttacccagggtgaagtgcaatggtgtgatctcggctcacagtaacctctgccttctaggttcaagcaattctccttcctcagcctcccgagaagctgggattacaggcacttgccaccacacctggataatttttgtatttttagtggagacagggtttcaccatgttggccaggctggtcttgaactcccgacctcatgtgatccacccacctcagcctcccaaagtggtgggaatacaggcgtgagccaccgcgcccggccttacgttggtttttacatacacagaagttttcatcacctgcgcttgttctggttatctttttttttgagacagagtctccctctgtcgcccaggctggagcgcaatggcccaatctcgcctcactataacttccacttcccgggttcaagcgattctcgtgcttcagcctcctgagtaactgagattacaggcacgtgccaccacgctcagctgatttttgtatttttagtagagatggggttttaccatgttggccaggctggtcttgaatgcctgacctcaagtgatccgcccgccttggcctcccaaagtgctggcattacaggcgtgagccactgcgcccagccctgttctagttctctgaagagattgtaagttgtagacacttctgtttcccctgtaacttctcaccatgtgctacttcatatgctgctcaatacagcagatgcacaataagtatccttagcccactgatcacctctttcagagcagggtcctgcaacactgagcattgctacaggttctcagttacacaatgaaaggaaatggaaggcattagagaccaccttgtccaaccaatccttacattactgcagttgaagaaatagaggctttgggagagtagagatttgcatgacgttggccatctcctggtccagtgcttttgctccaggacacatcgcttcctagatgcttcctgtttatggcctaggctgcctgcacttcagctcttgtttttggttcccctgcttgtcaggtacaatccactgttctatagccaggattttagtcacctagagctaccataacaaaataccacaaactgggtggcttaaacaacagaaatgaacttttcacagttctggaggtcagaaatccaagaccaagttgtttgcagggttggtttctcttgtgatctctccttggcttgcagatggccaccttcttattgtgtcttcagatggtttttctctgtgtgcacacatcctggggatctctccttcttctaaggacatcatttctatcaaattaatccttcatccttatgacttaatttaacttaacttttttttttttttttttttgagatgaagtttcactcttatttcccaggctggagtgcaatggtgcaatctcagttcactgcaacctccgcctcctgggttcaagcgattctcctgtgttagcctcccgagtagctgggattacaggcacctgccaccacacctggctaattttttgtatttttagtagagatgaggtttcgccatgttggccaggttggtctcgaactcctgacctcaggtgatctgcccacctcggcctcccgaagtgctgggatgaaaggcgtgagacaccgtgccctgctgaatttaactaaactttaaggaggtaattaatgcagtcacattaggggtcagagcttcagcatatgaattttgtcagaaaacaattcagtccataacagctagccacatttctccaccatgtactcaaatgtatttgtctctattgtctctttggaacattttggaaattgagctctggccctgtctagatttctttacgtttttttcttctcactgtatgtatttgtcatcagataagcagatatatagaagttaaatataacatttactaatgtatactgcaccttacgtagtccatggaattaattgtgcatcagaatatagacacagaaatttagaatgaaaagctgtcaagaagaatattgactctttcaggcggggcattgcaggcattactatctagctggaggcagggcagttgaggaaaactgtggaccaggatgcaatttttaattaaagaaggtttagaaatttggaaggagtagtcccaccttttctgccattttaccttccattgtttcagtttctcatgggccaaaaagattaaatagaaaatcccagaaaaaaagcaatttatgggtttaaaattgcgtgccattcagagtggcatgataaaatctcttgccatttgctttgtccaacctaggacacgaatcattcctttgtccagcctagccatgctacagacgctccccacccgttagtggcttagtagctgtcagggttatctgattgactgtcttggtattgcagtacttgaatccaagtaacccttcataatggctccaaagtgcaagagtagtgatgcaggcaatttggacatgccaaagagccataaagtgctttctttaagtgaaaaggtgaaagttctcagcttaataagctaagaataaaagttagctgaggttgctaagatctgtggtacaaatccatcttctatccatgaaattgcgaagaaagaaaaagaaattcatgccagttttactgctgtaccttcagttgcaaaattatggccacagggccataattttgataaatgcttagttaaaatgaaacagtcgttgcatttgtgggtggaagacatgaacagaaacctgttctgattgacagcaattaggtttggtactatctgcggttttgggcacccgctggaggtcttggaacatatgccctgaaggtaagggagaactactgctacatatatattttttcttgagacgggcttcataacttcattatttatctatttttcagaattcctgagtgtaggcttcataactttaatcagagacacaaagttacttatgggtcttaaaatcaagaatgacaatggtttagagtatactttgtctttgactatatatgactatatatatatgactttgactatatatgactatatatatgactatatatatgactgtatatgactatacatatgactatatatatgactatatatatattaaagccagtcaaatttagcagtggggggttgtataccaactttagtgacactaatgttagtaagttctgataacctactaccatcagagcagcctgcctttgacaatattgaatgcaaattaacatcttaaaataatgattaaaaatcccagcactttgggagactgagggagaaggattgttggagcccaggagttcaagatcagcttgggcaacatggcaaaaccccaaattagccggacgtgatagtcgttgcctgtaattccagctgcatgggaggctgaggtgggagaattgattgagcacgggaagttgaggctgcagtgagccatggtcacaccactgcactccagcctgggtgacagagtaagaccttatctcaaactaaacagtgaaaattttaaaaagtgagaatgttataataatttaaaaaaatttttttacaaaggaaatgtgtccttgctagtacttgacattgtcagccattttcagttaaaacttgatggtgtgtgaatagcagcacctaattgtgaaaagaccattgttggcttgcagaacacctcgtctgtgtactcaaggtagcaaaggaataatgtcatggtggattagtgcatggagccatgtgtggtttgtagactcataggactgatgactaggctttttggaacgtgtaaacaaacccaagtctgaagattttaatagatgaagataatttcttaaaagtgtgctttttagaaaaatattgtaaaatagccgggagcagtggctcacgactgtaatcccagcacgttggaaggccgaagtgggtggatcacctgaggtcagcagttcaaggccagcctgggcaacatggtgaaaccctgtctctactaaaaatacaaacaagttatccaggcgtggtgacacacccctgtaatcccagctacttgggaggctgaggcaggagaattgcttgaatccaggaggtggaggtggcagtgagcagagatcatgtcacactgcattccagcctgggcaacagagagagagactctgtttcacaaaaaaaagaaaaaaaattctaaaatatcgataagaaaaatgttttcagtttttaaagttcctgctatacctatctaattctcatataaaatgtgtcactgaagttcataccagaaaacaatataattgttttaaatgagaattaggtatagcaagaactttaaaataatatgatagggccgttcttgcaaaggaggtacataaatgtagaaatatgaatttccctttaagaagagaatgagctttaattatagggaaaaaaaagaagcaaacaatttgcgccttaaatgtctgttcatgtactgggccataaattgacttgtttgtattgacaagaaatctaaagaaaacagaaatttaatatctaggcagctaagcagaatcaacttacctgatcaacttatctgttgattaatcaaggttaggtgaaagtcacagtaggaactgtactcaattatttataataaatgacaaattttctctgcttcttgatattcattttgaagagataagaactctcttgatgtcaaattgatttcctagggaggatatttttgtttattttttacgtaaattttttttaaatcatccatcccaaaatgtcagagaggctcttattactcatctaaattataactctttccctctacatttgtatttttgttagttttattcaacatgttgtagataatgcataaaatgataaattattcttacttttcgttttgttttgagacagagttttgctttgttgcccaggctggagtgcagtgatgtaatttcggctcactgcagcctctgcctcccaggctcaagtgattttcctgcctccctagtagctgagattacagacttgctccaccacacagggctaattttttatatttttttgtagagacagggttttgctatgttgcccaggctggtcatgaactcttggcctcaagcgattctcccacctcaccctcccaatgtgctggaattacgggcgtgagccactacccttggcctgtttatctttttgtgattggcttcttttaattagcataatgtcttcaatgtttttccatgttatagcatatgtcagaattttcttcctttttaaggctgaatcatataccatggtatttatataccacattttgtttgtccacttctccacgatggacatttgggttgcttccactttgtggatattcagaataatgctgctatgaacatgagtatgcaagagatttttagtacaggcatacctcatgtatgttactttattgtgctttactgatattgcattttttataatgtggaggtttgtgggaaccttgcattaagcaagtctgtcagtgccatttttccagtggcacatgttcatttcttgtctctgcatcacattttaataattctcgcaatatttcaaacttttttattttatcattattgtatctgttatgacaatctttaatcggcgatctttgatgtcactattgtaattgttttggagtgtcatgaactgcacccatataagatggggcaaaccaattagataaatgttatatatgttctgactattccactgaccgatcctgtctctctccctctaccttgagatgccacagtgttgaaattaggccaattaataatcctataatggccacttagtgaaacaaaatgaaataaagagtcttgcatatctcagtttaaatcaaaagctagaaataattaagcttagtgaggaaggcatgttgaaagctgagataggttgaaagctaggcctcttgtgccaaacagttagccaagttgtgaatgcaaaggaaaggtgcttgatggaaattataagtgctactccagtgaacacacaaatgataaaaaaagaaacaactttattgctgatatgaagaaagtttgagtggtctggatggaagatcaaaccagccacagcattcccctaaatgaaagactaatccagaataaggtcctaactcttttcaattctatgaagtctgagagaggtgagaaagcttcaaaagaaaagtttgaacctagcagatgttggttcatgaggtttaaagaaagaagcagtctctgtaatataaaagttcagggtgaagcaataaatgctaacagaggagctgcagcaagttatttagaagatctagctaagattattgatgaggtacctacactaaacaaagattttcaatgtagaccaacagccttatgttggaagaagatgccatctgagactttcatagctagagagaagtcaatgtctggcttcaaaacttcaaaggacaggctgactctcttgttaggagacaattggaggtttgtgggaaccttggatcgagcaagtctatcagtatctgtgctggtgactttgtgttaaagccagccctcatttaccatgccaaaattttaggtcccttaataattatgctaaatgtactccacttgtgctctataaatagaacaacaaagcctgaatctcagtacatttgtctttagtatggtttactgaatattttaagcccactgttgagatctactgctttaaaaaagaaagattcctttaaacatatttctgctcattgaccacacacctggtcacccaagagctcttatggaaatattacaaggagatgaatgttgttttcatgcctgctaacacaacatccattctgcagccccagcccatggatcaagaaataactttaaatttcaactctttttttttttttttttttgagatggagtcttgctttgtcgcccaggctgaagtgcagtggcactatctcggctcactgcaagctccacctcctgggttcatgccattttcccgtctcagcctcccaagtagctgggattacaggcgcctgccaccatgcccggctaattttttttttttgtattttttagtagagacggggtttcaccacgttagccaggatggtctcgatctcctgacctcatgatccacccgcctcggcctcccaaagtgctgggattacaggcgtgagccaccgcacctggccttcaactcttattatttaaggaatacatttggtatgactttagctgctgtaggtagtgattcctctgatggatctggacaaagtaaactgaaaactttctggaaaggattcaccattctagatgccattaagaacattcgtgattcatgggaggaggtcaaaatgcaacattaatgagagttttagagatgctgatcccaactttcatggatgactttgaggggttcaagacttcagtggaggaagtcactgtagaaggtgctggaaatagcaagacatctacgattaaaactggagcttgaagggtgtgactgaatctcattaaaaaacttgattagatgaggaggtgcttcttatggatgaataaagaaaatggttcattgaaatggaatctactggtgaagatagaccattgtagaaacgacaacaaaggatttagaatatgacataaacctagttgataaaacagtggcagagtttgagaagattgactccagttttgaaagtagttctactgtgggtaaaatgctatcaaatagcatcacatgctacagagaaatcttttgtgaaaggaagagttaatcaatgtggccaacttcatcattgtcttattttaagacatagccccagccaccttaaccttcagcaaccaccattctgatcagttagcaaccatcaacattgagagaagacccttcaccagcacatagattacaactcactgaaggctcagatggttggtagcgttttttagcaataaattattttaattaagttatgtacgttgttttttagacgtaatgctattgaacacttaatacacttaatagtgtcagcataactactatatgcattaggaaaccaaactatttgtgtgactagctttattgccatattcactttattgtagtggactggaaccaaactttcaatgtctccaaggtattcctgcctttaaagaaaaaatattctccaaattatcctaatgtgcagccaagagagagaaccactaatagtgtttctaaacttagaagacagtcctatgttagaaatttaatataaaccttaatgtgaagttttaagaaatagtatatggcatctatacattactttagaaaaaggtagacatattgcatctattttctattttgaagttgagtttttttttggtcttgaatttaaggtgttactgtggccgactgattggagaccatgctgggatagattattcctggaccatctcagctgccaagggtaaagaaagtgaacaatggtctgttgaaaagcacacaacgaaaagcccaacagatacttttggcacgattaatttccaagatggagagcacacccatcatgccaaggtttgctaataacccaaattgttttgctggtttctttctttttttttttttttcgagacggggttttgctcttgttgcccaggctggagtgcaatggcacgatctcggcgcactgcaacctctgcctcccgggttcaagtgattctcctgcctcaacctcctgagtagctgggactacaggcatgggccaccactcctggctaattttgtatttttagtagagacggggtttctactaacaggtttctgcctgtttgaagtatttgtgccttcacatttttcaatagctgcaccgttcctgatgttcagaaattttaatattttaattttggaataaaggaattatgtatcaagaagttcaggctgggcacgttggctcacacctgtaaccccagaactctgggaggccaaggcaggtggatcacctgaggtcaggagtttgagaccagcctggccaacatggcgaaaacccatctctactaaaaaatacaaaatttagctggtatggtggcacaggcctgtaatcccagctacttgggaggctgaggctggagaatcacttgaacctgggaggcagaggttgcagtgagccaagattgcaccactgcactccagcctgggcgacagcataagacttcatctcaaaaagaaaaaaaaaaagaagttcaaagatgaattggaaattgttttaaattactgtcatgttctggaggatcatatgttaattcctatttgcatgtatggagatctttgcctgtggttttgtttcataattcatggtttcttattgtccttacttcttcctgtaaatctggcttattcttgctgttggttcgtgtaagtttgagggaggcaaattcatctcaatatcctttgagtgatctgcatttgctggaaaaagcaagccagctgtgcaatacaatattaggtaaaataaaaaatgattctggggctacctgctggctttgatttccctcatcttttcttttgcttacattgacgattaaagagatgactgtttttgtgaaaagtatttgtttcagaacaaaagtgttttcagagggataatggttagaaggtaaaatttacaattttaattagaaggtaaaatttacaataaattaaatgtccatgctctagaatcttaatttaaattatgcaaatctgtgaaatgattaagtaaacagaaagccatagcatttatgaaaaatcccatttcacctatttgttatagcttctgatgaaaaggtttgctgacatagtgattttggccagttgttcgaaatatttctttttcttttctttttttttctttctttctttttttttttttttttgagacagagtcctgctctgtcacccaggctggagtgcagtggcgtgagtggatgaatgatctcagctcactgcaacctccgcctcctgggctcaagcggttctcctgcctcagtcacccgggtagctgggattacagatgtgtgccaccatgcctggctaatttttttgtatttttagtagagatggggtttcaccatgttggccaggctggtcttgaactcctgacctcaggtgttccgcccacctcggcctcccgaagtgctggaattacaggcgtgagccaccgcaccctgcctgtttgaagtatttctgcctcaccccaggttctctggagagcattggtgggccagccttgaaaaccagaggaagctttcctacagtgacttgtaattcccagaaggaacttaatgggagtgtggaatcttttaaaagtaaatatttccattacatgaagatgaactttaaagagatcccacatacttccttttagattttggccatttcagttgccctgctgtgtgctcattgtttctgtgcctggcataacttttttacaatgttctgttcacctacatgtgcttttcttgcagtatattagaacttcttatgatacaaaactggatcatctgttacatttaatgttgaaagagtggaaaatggaactgcccaagcttgtgatctcagtccatgggggcatccagaactttactatgccctctaaatttaaagagattttcagccaaggtttggttaaagctgcagagacaacaggagcgtggataataactgaaggcatcaatacaggtaaagctccctccctccatttctcccaccctctctttcaccctccctctctccctccctctctccctcttttcttttttcctttctctttcttttcttttctttccctccctccctccctccctccctccttccttccttccttccttccttccttccttccttcctctctctcttctctttttcttttttctttctaactgtgaatcaggtagtgtgccacataatctctgctctgtagcactcctaggatatgtggtgctgtgaggaagaaagatgaaaatcctagtgactagaaaataaacccagaagaatcatagatttttcctggaatgtgtttttaccattgtcagaatatactattttaatgtaacttcagataaacctctggaaaagaaaatagtctttcctgagctcccaactacagcaaggctagaagggacatcgaatccatgcaagtgcatagtgtgtgtgggcctggactttcactaaactcatataatcattgtcagtttctcagatttgggaaatcagtgatgtgggtaaaacttgcattgcgtgttttgggcatgagtagatactttttttttaactacatgattgccaaaacactcaccgtctcaatcactgactcttctacacttcttaaaatctgaaattccagaattgtatatggggggctctgaccttatttctttgcttcagtgtttgtgaactgtctgcacataaggacaacctggggagcttttaaaatacaaatgtacaggctcttccccagatgaattagaggcttttagtcaggagcttctgaagtatgtcagccaggattgagaactagtgattccataaactcttgtctcttaccagtttgttactaacctgtggttttctttttctttttttttttttttttgagatgaagtctcgctcttgtcacccaggctggagtgcaatggtgcagtcttggctcactgcgatctccgcctcccaggttcaagcgattctcctgcctcagcctcccaagtagctgggattacaggtgcctgtcaccacacctggctaatttttgtatttttagtagagacagggtttcaccatattggccaggctggcctcgaactcctgacctcaggcgatctgcccaccttggcctcccaaagtgctgggattacaggcgtgagccaccatgtctggcctaacctgtggttttctatcttccctttacttttctctcttttgatttggcatgccctgcccagtgtctcctatcaaattttgcccatgttttaagatctacacgagatgccaacgcactcgtcaaacagcttcttgaatatctcaactagagctactcacttttgtcttttaatttctacagcatttactgcctgtagcacttgcagaatgttggtattttgccttacaggctaggatgagtcagtgtgttagctctccttctggttgtgtactagaggcaagggcctgagcatctgcctaagcatttagcaccttgtactgacataacaaagttccttttgactgaaaaggaatgaaggaagtgaatgactgaaaaaacaaagtaaaataaaaccaagggatttggcccatcacaaataggtaacgcacactttatcatacatattttatagagattgtttcacattcttggaagaaactgaagttggcagagttctaagtccattgtatagttcttatttgatttccagtgaagtgggtgggtagggaagtttcacataattcattgaaaagacaggcttgggcaaggctttttctttgaataactaactgcatgtcgtgcttcattttacttaatgccttaaaaagatcattgagtttatggccagttaacctaaagaaacacaaatagagtagtgtggagatgattgaaatacttcatataaacaaaagaaatgggacatgagaaatacttggatctccactaaacaacagtcaggccagatacagtggttcatgcctataatcccagcctttcgggaagctgagggctggtgaattgcctgagctcaggagttcgagaccaccctgggcaatgtggcaaaaccctatctctaaaaaattgcagaaattagctggatgtggtggtgtgcacctgtagacccagctactggggaggctgaggtgggaggtttacttgagcctgggaggtcaaggctgcagtgagctatgatcatgtcactctacccagcctgggtggcaaagcaagaccctgtcttaaaaaaaaaaaaaaaaaaaagggggccgggcgtggtggctcacacctgtaatcccaacactttgggagcccaaggtgggtggatcacaaggtcaggagatcgagaccaacctggccaacacggtgaaaccccgtctctactaaaaatacaaaaaattagccgagtgtggcggcgggcgcctgtagtcccagctacttgggaggctgaggcaggagaatggcatgaacccaggaggcggaggttgcagcgagccgagatcgtgccactgcactccagcctgggcgacgagcgagactccgtctcaaaaaaaaaaaagaaaacaacaacaacataaaacaatcaggctaacctgattcaaccacagctcctctatggcctggctacttaaggattagtccctggaccagcagcatcagcatcagctgagagcttgctgaaagtgcctatttcaggccccaccccagacctgcagaatcagaacctgcattttaacaacatccccagatgattcccgtgcacgtttaaatttgaactctgcttatgagctcctgtctattcttgacaggcttctcaaccatagttgaacataatttcgcatgaatctttgacatttacttaaattgaatgccacaagccttaagaatctactatgtgaaaagcatttggataggtgttaggaatgaaagaggagtaacacggaccctgaatttagtgatgggttgggctgtgacagacaaaaagcaactagtgagaaattgatgctgactgggttatagttgagattcaaaggaactgttttgagaatacaaggaagacggacatgaattctagtttcaactgagggcaccttggaagtcttgggaaggatatagcacttggcattggtcttgtggtaaaggtaggaagcggcattagtaagaagtggcagctcagggttaggcacacagctagaggtgaaggcatgtgtagaaagaagtgataaagctcctggctggagtgtgtgccatgtggcaggggacagggactgcaaaggagactggagccagattgggtgccatgctgaagtcttattctctacatagcaaggagccctgaaaggaatttgaacagcaggatgaataggggaataacatggtcaaattgggttttacggagagtctcaaacaacgatatgtgttaggatcacatgtaaggtgcttaaaacaacaacagtgttggcacaccatgccaaaccatggaatcagaatctctactggggtggatggctccacacttgatattgatgtgtgcctgtgatccagatcccaggttctagagatggctctgggagagggtcagaaaatgagttggaagggaagatgccaggaatgaggaagtgatttagctgctaagcctcagatccatgccatatgcaggttatttttccttctgtgctaatgacacatataaggtcagtaccacacataggaagaataggaagaataagtcttacaatgcagtattgtgatttaaaggtcagatcaagccaatctcaaaggctacttactgtatgattccaactatagtatatgacattctggaaaaggcaaatctatggagacagtagaaagatcagcagttgccaggagctgaggggggagagggatgagtaggcagagcacagaatattttcaggccagtgatactaacatggtggatatacatcattgtatctttgtcaaaactcatagaatgtacagcagcaagagtgaaccctaatgtaaactgatgtaaactgtggactatggagaatagtgatattctattgtcatgaccctataatgtagggtcatcaattgtaacagatgtaccagtctcctgggggatgctgatagtcggggaggctgtgtttgtgtgggagcagggcatggcatgggaactttctgtacttttcattcaattttgctgtgaacccaaaactactctaaaaaataaagtctattcttgaaaaaggtcaaattgcctaaattggaatccaatctctacaaaatccaagctctaaataaattgtccaaagctctacaaaccttggacaatttatttaaactctcagtgccacaattttttgcctataaagtggactaaaaacattcctacttaaagtgtaaatacatacaaaggtagccaacacttactgaaatcttactgtaggccagtaagtgttggctactgtactaattactagtattaattccagaagggcgaacattaacatattactcctcaatgtattagctttgaaatatttgtgcatataaagctattaaattagtttgccttaatgagcaagggacatatctgcaggatgttgtgctgggacattgggtaagattaggcataaaaaaaacattcataataggagaaaatttttgcagtctacccatctgtcaaagggctaatatccaaactctacaaagaacttaaacaaatttacaagaagaaatcaaacaaccccatcaaaaagtgggcaaaggatatgaacagacacttttcattagaagacatttatgcagccaacagacacatgaaaaaatgctcatcagcactggccatcagagaaatgcagatcaaaaccacaatgagataccatctcacaccagttagaatggtgattattaaaaagtcaggaaacaggtgctggagaggatgtggagaaataggaacacttttacactgttggtgggagtgtaaactagttcaaccattgtggaagacagtgtggcgattcctcaaggatctagtactggaaataccatttgacccagcaatcctattactgggtatatacccaaaggattataaatcatgctactataaagacacatgcacacgtatgtttattgcggcactattcacaatagcaaagacttggaaccaactcaaatgtccatcagggatagattggattaagaaaatgtggcacatatacaccatggaatactatgcagccataaaagggatgagttcatgtcccttgtagggacatagatgagcaaactatcgcaaggacagaaaaccagacaccgcatgttctcactcataggtgggaattgaacaatgagaacacttggacatagggtggggaacatcacacaccagggcctgtcagggggtggggggctgggggagggctaacattaggagaaatacctaaaggaggagttaatgggtgcagcaaaccaacatggcacatgtatacatatgtaacaaacccactcgttgtgcgcatgtaccctagaacttaaagtataataataataataataataataagcattcataatgttagggctgggcttgctgaggaaggacagtgcacagcattttgcttaggcaagagtaggatcggatctgaagttgtaggcagaaattgcccaaagggctcagaggaacattgttcaggtagagagaggtaatgataagaggaagatgtgtctagaaagaatagaggaagccaaggtatcagaaactaattccactgtaccagcaactctccctaagaatagcccttgcatatgcttgcctatttatttgtctgtttctggcagtctctttgttttgcacgatttgtgaattaaagtttgacttctaaactggttgttcataggagtgtccaagcatgttggggatgccttgaaatcccattcctctcattccttgagaaaaatctggacagttggaatccctccttggggtgtcattgagaaccagagagaccttattggaaaagatgtaagtagacaatcctttcataacaaaagcaaacgaacacgtgtgcaaattgccagcttaacactgtacctggatgtctaatgaatgaacattacagatgtaatatattcactaccaactcctgactttctgctgcttccctcaccctgtcttagaagatgacagtcccacccttgcagttgctcaagtcaaaagccttggactaatcctggaatgatctctttgtctcacactcaaacttgatctatcagttccactttaaaaatatatctaaaatctgatttcttcttctcactgcccttactgttactgagtgaatccgagccaccattatctgttgcctgaatgattgcaatagccatctttactcttacctttgtctcctaacagcatagtctcaacatagtagccagaatgattctttaaaaatatacaaatcagatcacgccattcctctgtgtaaaacacttcaaggacttctgtctcacttaaggtagtagccaaggttcttgaagtggtttgcccgtagtgaaacaagggacattcttaatttggccctcctagttctcatctgttatcttgtattactctgcttcattccttcttgtgtattgattctttgttcctaagtattctttcaaagggaacggacttgtctcagtctctttgtaagactaatataattttttggtaaaatattagatatgagaaaatgttctaaagaagaaagatgactactgttaatatttctgtcaggatcatttcagaattttttctatgtatgtgtgtataaggacagcaaaaaaagtgtgtatttaaaaatagtaacagaactgattgctataaatgtgctttttttcagcttacctatttgccgtagttatttctccatgtcgattaatacagacatgattatgggttgttttaaatttttttttttttttcctgagacggagtctcgctctcttgcccaggctggtgtgtagtggcgcagtcttggctcactgcaatctccacctcctgggttcaagcaattctcttgccttagcctcccaagtagctgggattacaggcacccaccaccaggcccggcaaatttttgtatttttagtagagacagggtttcaccatgttggctaggctggtctcaaactcctgacctcagatgatctgcctgcctcggcttcccaaagtgctgggattacaggcgtgagccaccacacccagcctgttttaactttgattttggaaaacttgcaacatattaggcagtagagaagttagaaaaatgaactcttttctatgtacctatctccagcttcaacagttaccagctcatagccaattttgtttcgcctcttcccttatccattcagccgacaccctccgttattttgaagcaaatttgagacatcaaataatttcatctataaatattttagtagttctttctaaaatatatggacaatgaaaatatataatcacaatgaagttattatatctaaaaaattaccaggaatttctgagtatcactgactatccagtctagtcaagtttttcattgcctcataatgtttttttcaaaaacagggtttcttaagtcttcattatttagtgatttgatttcattatccaaaaaagtttcatatattgtgatgggttgttatatctcttgacttgcttttatttttgtcacttttaatctatggattttacctccatctcatttttttatgtgtgtgtaatttatttattgaggaaactgggtcatttgttctgaagagtttcctccagcttggattttccagatttaatcttttgtagtggtgtttagcatgtttctttgcttcttttctgtaaattggtagtttgattgagaggtatgatcaggttcaggttttctgtgtaagtttatgccataggaggaggtatgtctttcccttgtaatatatgggggtctctctttttataatgttagcagtcgttgcatagattcattatttcaacagagttccaacgtgatgacatttaattataatgtcctttgtttattagtttacatgctctatgtacttaacactctaatacttaaatactccatatagataaacgttttctcaccaatcacttggtttaccttgtggtacagttgtataggaagggctgaataaatgcttgactcttttctttttatttgccagttttcaaaataatgaaaggtgaatgatgagttttcttaactcataaatgtaaacatctttgtcatatttcaatccatgaatcaatacagttattattcttaataatgttcaaattatcccattttggccggtggagtgttttcaagatgtctcctcctcttttcatacaattccattgtctatcatgacttccttgctttttagtatgaaaaaatattccaggctcattgtgtatattttttgtttctcagagtaaaggctgtttgcttttagtgggacatagctttttatttttatttttttcccagagatggagtcttgctgtgttgcccaggctggagtgtggtggcacgatctcagctcactgcaacctccgcctcctgggttcaagcgattctcctgcctcagcctcccaagtagctgggataacaggcacccgctaccacacccagctaatttttttattgttggtaaagatggggtttcaccatattggctgggctggtctcgaattcatgaccttgtgatccacccacttcggcctcccaaagtgctgggattacaggcgggagccactgtgcctggtcagtgagacatagtattagcagagcacatctggaggccaaggaaacattttgatttttcatgtcagctagtatcatactgtactgtattgaatcaatgattcctctattattgtccatttaggtcatgttctgtttttcacttttgaggataataataataatattgtgataagatatgtaaatctttgatactagcttgcttatttccctagaattaattctcgaagtggaatgcttggaccagtctgtataaccgtttaaaatgtgacacattgcctctggaagggtggtaacaattcacattcttggctgggcatggtggctcatgcctataaccccagtactttgggaggccgaggccgaggccggcggattgcttgagctcacgagtttgagactagcctgaggaacatggtgaaacccttgtctacaaaaaaaaaaaaaaaaaaaaaaaaaaaaacaaaaattagctgggcatggtggtgcacgcctatagtctcagctacttggggggctgaggtggaaggattgcttgaacctgggaagttgaggttgtggtgagctgtgattgcaccactgcactccagcctgggcaacagagtaagaccctgtctcaaacaaacaaaccaaacaacaacaaaaacaaaaatagccagcatggcagcatgtgcctgtgatcttagctactcaggaggctgaggtgggaggatcgctcgagcccgggaggcagaggttgcagtgatcccagatgggcactactgtactccagcctgggtgacagaattagaccttgtctaaaagaaaaaaacaaaacaaacaaacaaacaaaaaaaccccaaaacaaaacaattcatattattttcaatggggtatgtggatgcccattgagttctgagtattctgtttttttttcaagctctacccttctgttaaggtataaaataatacctaatttttcttatttacatttccctgattgctagtgaggttcaacatctcttcatctggtttttgtacattttcaagcagggattttagacttcttaaccttcaagtttttttgttttgttttgtttttttaagataaaatttgctctgttgccaaggctgaagtacaatggcatgatcatagctcactgcagtcttgaactgttgggctcaagtgatcctcccatgtcagcctccagagtagttggtactacatgcatgcaccgccacacccaactaattcttaaaaatttttttcttttagagatggggccttgctgtgttgttcagattggttttgaacccttggcctcaagtgatcttcctgccttggcctcccaaagtgttgggattataggaatgagcctctctctgtgtctagccttgaaagatcctataattcagcctagtaacaattttgtttgtcaagtatgctgcatttctcatagtttttattttatattatttcttatctttttaaaataaatacaaaatatgtattaaatctctcaattattttccttttggtttcttgcctcagtgtcatgcttcgaaattataaaggtaacatttaaagcctaatgtttataaagttcagagtgccttttgcatccattatttctttgaagcctcacaacaaccctctgaataaaaattatcagtatcatcatccttacttatacctgaggaaaataagcctgagaaagaaagcaagaattactcagagttaaggttagtaagtagaagagccttgacttaaacttgggctttcttactctaaatattgtgcttttgcctctaaaagcaaatacgaagtggagcagcttaagaaaatgtccattaatgtaataaagattttgatgttttataatgaatgaaatactgtttggctggttggctgttccactgttttatttatttatttatttttgagatggggtctcactgtgtcgcccaggctggagtgcagtggcgagatcttggctcactgcaacctccacctcccaggttcaagtgattcttgtgcttcagcctcctgagtagctggactacaggcgcatgccaccatgcctggctaatttttgtatttttggtagagatagggttttaccatgttggccaggctggtctcgaactcctaacctcaactgatccgctagcttcggcctcctaaagtgctggtattacaggcataaccgctcctggccagctgttactctttattttgtttgaaatactagagaaaagtcagtgtcaaaatattattctggaataaatctataaaaagacactatttttgaataatggtgtggtctatgtactggtgccagtccttgaactgttttttaatgatttgaaacaaggtaagcacagaaatgaaaacgaaggctgggcgtgaaaccccgtctctcctaaaaatacaaaaattagccaagcgtggagatgtgtgcctgtagacccagctactcgggaggctgaagcaggagaatcgcttgaacttgggaggctaaggttgcagtgagctgagatcatgccactgcactccagcctgggcaatagagcaagactccatctcaaaaaaaaaaaaaaagaaagaaaggaaaaaaaaatatttagaaccactgccagcaatgtgaccatgctgtgtcattcaagcacgtggaaagcaggctaatcttgctgaacagggtttgtttcaatactgttgaacttgtgttgtgaatctcatgtaccacaagctgcctactagttattcatagtgggatcacatatcggtccattaaaacatgggaaatttaaaaaattgataccacagatagtttgagaagcactgctctaaattgcaagtaatactttttttttttctttttgagacggagtctcgttctgttgcactggagtgcagtggcgcgatctcacctcactgcaacttctgcctgccgggttcaagcaattctcctgcctcagcctcccaagtagctgggactacaggcacctgccaccatgcctggccaatttttttgtgtatttttagtagagatggggtttcaccgtgttagtaaggctggtctctatctcctgaccttgtgatccgcccaccttggcttcccaaagtgctgggattacaggcatgagccaccatgcctggccgcaagtagtactttttaaactagacaggaactcttttagcacataaagataggcctttggagcaggtgagcctggggaaggatctagagctctgaccctcccttgtccttgctgtctctcaggtggtgtgcctgtaccagactctggataaccccctcagcaagctcacaacactcaacagcatgcactcgcacttcatcctgtctgatgatgggaccgtgggcaagtatggaaatgaaatgaagctcagaaggaacctggagaagtacctctctctgcagaaaatacactgccgtgagtatcacaggggctcagtcacccagtctggttgcaggcctgctgaggtctttcatggtcttccctgaccatcagagctcactctcctagtcccctcaagctagcctccttaatactcttcagccaccccccttcccacatgggcatctcccctcctctctccctccatgtatccaatccaaatgacacttcgaggatccactaaagtcttcatccttccatgatccccccaaagatttcttcctctctctcaactgtcatccacaagtctgcactgtctgatatcctgtgttcttccggctgtgggttcaccatggtcaaggtgctcacttatcacctgcacagagtagaggccgaagttggcccctgccttagagcagccagagggattaagttaacatagggaacccgaagccagaagaaagcaggatataagaccgtgcagacttgtgggtgacagttgagagagaggaagaaatgtttgggggatgatggagggatgaagactttagtggatcctcaaagagtcatttgggttggatagatggagggagagaggaggggagatacccatgtgggaaggggggtggctgaagagcattaaggaggctagcttgaggggactaggggtgtgagctttgatggtcagggaagatgacatttcatgtgttggtggggtggccctaggcagggaaggggttaagaccagacaggatttttagaaatagggaccttggggctgggtgtggtggctcacgcctgtaatcccagcactttgggaggctgaggcgggtggatcacctgaagtcaggagtcgagaccaacctggccaacatggtgaaaccctgtctctgctaaaaatacaaaaattagccaggtgtggtggtgcatgcctgtaatcccagctactcaggaggctgaggcaggagaatgacttgaacctggggtgtagaggttacagtgagctgagatcgccccactgcacttcagcccaggtgacagagcaagactctgtctcaaaaaaaaaaaaaaaaaaaagaaagaaaaagaaaaagaaatagggaccttggaaagtgtcaagtttgtgtcatgctcacagtggtgcttcaagagggccattttggtagttttatctggaggagggcaaggagaagggagggccagaatcagcatgcaccactgggcagggaagtgtgaatcctttacagagagcaggagggctgagtgctgcctggaaaactgtagacttttggttcaaggcaccagaaagtcgacccctgcctcttgtgccgaattaaatcttccacaaaatacttccttgggacaaagggccagggagtgggaatgccttcaggaggctcaagtcctcttcagcctttgagcattgggctgaaaaaatgaaagactggaagtccatttagtttttggccttgatccctggaggcagcagaatgtagtgaggtcagacagattgaagcgctgtcattttgtgcctgtgaccttggccagatggcattaacatctgtcaactgttttcttattataaaatgaaaagaactatctacgtctaacgtttgttgtgacaattaattgagaagatgtatattagggatgtctagaattgtgttgggtgcacggtgtgtctttaataaatgtctgtttctttccttcctttttccctcctttggtacagtgatcatctcatggttgtggggtaggaggaggggagggactctgggaattgtggtcgttcacttaactcttagtgtgaataaggattctgaggcttatgcaggtcaggaaaaggggagagaggatcaggtatgtggtcttctgcggggtaggaatggctgggagaagggagaccagcagagcagagggaaggaagagaggtcagagaaggaccttgaagaagaatccgtatagagagggatccattaggggcctgaaatattacctgaaatgtcctgttgcctctgttgacctttgcccaccacctaaattgcgtggggttctgtgcagcgctataatgtatgctccatgggaggtatgagagtctttgtctttcttattccctgctgattgcccattttagtaagaatgcaacaaccctgagcttgcttatagtagcagatgacatttctactttcaaagaccttgaaacctaggatttatctggaggcttttgctgactatggagtcaattccagtggactggtaacatttattattctaaggagaacccatataaaaacagcaaaaacaagaagccacctatacacacacacatacacacacacacacacacacacacacggaagaaagagaagacatgccctcaagaaactcaaaattcttatgtatcaagctgatcttcatacctaacatacttatgagggaggttggctaccatatttgtatttgttgttgatttgatcaaaaagggatttatttttgatggcatgaaaatacttaactagtggttgatttatttgacttttttgttttttctggagactgagtctcactttgtcacccaggctggagtgcaatggcgtgatatcagttcactgcaacctctgcctccctggttcaaacaattctcctgccccagcctcctgagtagctgggattacaagcacctgccaccacacccggctaatttttttctatttttgatagtgacaggattttaccatgttggccaggctggtctcgaactcctgacctcaagtaatccacctgccttggcctcccaaagtgctggaattacaggtgtgagccaccatgcccagcctgtggttgatttattttattgcttttcagccagtcttcttggtgactctggcaaacccttgttgttggcagagaatactttaaaaaaaaaaaaagactcacattataaagttgctgtaggaatccctggctttcagccatttgaaatgtggccaatgtcagcttctgttttgtaagactctaaggatgtgatttcaagataggaaacataggctctgatgcctctgtatcttttcgtaatccaagtctcaagggagaagagtgctctttcctggaatgtctgttctaggaacttttaatttggaggtctaatattgtattcctgcctcaccctgggaccttacagtagaagcagctctctagtgagatttctcagcaagaattttacatttttttctttttaaaccaatttttattagtgtatcagtaagatttttttttttttttttttttttttttttttttttcagaaaaagccataaatatatttgattttgtgggcataagttattatttcaagagaagtgggccaggtgtggtggctcacccctgtagtcccagcactttgggaggctgaggtggatggatcccctgaggtcaggagttcaagtccagcctggccaacatggtgaaaccccgtctctactaaaaatacaaaaaagcagccgggcatgatggcgcgcacctgtaatcccagctattcagggggctgaggcaggagaatcacttgaacccaggaggcagaggttgcagtgagctaagatggtgccactgcactccagcctgggcaacaaagtgagactccataaaaaaaaaaaaagtgtacctaacagaaattgaattctcttcctcttccacaaaaatgcccatattaatttttttttctttttcggatggtaaaagtattatatacttccacattcaggtaatgcaaagaaagcatataacagaagaaagggacagttttctgtaatctcactatcaaaactaaccattcttaaccttttcatatgtatattttcacaaattttctacacacacatgcagacgcacacacacacacacaagcaacatcttttaagcaaaaactggggtgatttcataatgcttcttttgtagtttttcccctgccccactaaacacggtcctatttccatgtcaatgagtataatttagtacattttaatggctgaataacgttttattgcacaagatacaaaaaattcacttacaagtgtttttattccaaaatcaataaaatattaatcgaaattttcttctattacttttgtgccttatactatttttgccgcctcatttggcttttataagactatttagagaaaccctatgtctattagttggtacatcatagatatgctttttagtgatatggagaaaataatgaggtggaggtgtatggaaaaggagtagaatgtcaaagcaactaaatcgatggagtgaagtttttggatggttgctaactgacccatccctaacatttgagagcctgacacaggatacacatggaagaccacatactatacgtctagatatttaaatgccttaaatctagataactgtataaaatatgtcctagccttttatcttgacacatatagctggaaggccagacttgagtttggaaaccttggatttttggaagtacttagcaacgtggtgttctttgggcatcctagtaagctggggagggagcacaggcttcccttgacccttgaccctgtagatgtctcaccatgagggcaggggtgtggccagaggaaggccagtgtgcgcccctgaaaacatggggctcagagtaaagtcctcttttgctcaggggtgagtgtggcattgcttgccaaattttcttcttttggaaaataaaataaaatacagtgatttaaatgtagtatatcaatatatgtgtggtgtgaaaacataaagcaaataagaaatctacagaataaatagacaaggtcccttttcaacattttcctaaaccttcccttctcttttccactgttcatagtgtgatgtgtatccttccagaattttctggtcatttatataacatgctatacatacaggtatgtgcatatatacatataaaatatgtatgtaagtatatttttaaaaaatatacataggataatactgtgcatattattctgtaagcttttttgcttacatcttttttaaaagaatgactctgcagttattcctttctgttctttctcccttactttaagaaagtaatatatatataggcttgggtcacgtagtctgcaagaaaaaaaggtaatatatagtcatgataaaaaattcaaacaataaaaaatgaaataaatggcaatgcaaaagtctttgagtgttgtcatcctaccttgttcctagaaataaccaccattaaaagtttatagagtctaggtgtggtggctcacacctgtaattccaagactttgggaggctgaggcaggaagatcacttgagacaaggagcttgagatcaacctgagcaacatagggagaccccatctctacaaataactgaaaaaaaaaaaaagctaggtgtggtggtacatacctgtggtcccatctactcaggaggctgagacaggaggattgcgtgagcctggtaagtcgaggctgcagtgagctgtgatcacaccactgcattccagcctagctgacagagtgagaccttgtcttatataaaataaataaataagtaataattaaaatgtttgttgaactggttaaggttgttcatttttggagatgagtgatgaacacattgggatctattatattgttctgtttacttttagatactttgggagtttcccgtaatggaatacttatttcttaagcaatacttatttttttgaaaaattattgaaagcctttttacctggtaaaagcttgaagatgctgtcaccatatttatgccacattttatttgaagtccaagtttctggcttggtcttgatctaagcaaaccagggtaaaatgagagaggggccagtgtgaggaatgaacataggtggtaattgagagacttgtgtctggaagtcaaaacggccgactggctgagctagggattctctaacagtgtggtattgtttgtggtctggaataggctcaagacaaggcgtgccggtcgtggggctggtggtggaaggcggtcccaacgtcatcctgtcagtgtgggagactgtcaaggacaaggacccagtggtggtgtgtgagggcacaggtagggcggctgacctcctggccttcacacacaaacacctggcagatgaagggtgagttgttggctcttcttttttgaaactataggggctgtttattcctccattttagttcttttggctgtgcatttatgtgagccagatattcttggattatagaagttgagactggatttcatttctcagtgactgtgtttgttgttcaacatcaaaatgcccttcagcgatgagagttgctattttcttagctgaagaatggcctgcctttaaagggaagcttgagtcttgcttgaactttggggaaaaggtgtttgcagggggagtgagggaggtgtggcttgagcaattggccattacagccgtaaggaccttgtaagggaggtggccagtgttgggcccagagcaccttcaaattcatttgcccttaatggaaatagcagaaattgggaaggtctacatcctgacattttcatagcatatgtcgtgcttatttcaggctttaattctttccccttctcaaataagaagataatttttctcttgccatccctctagccagtgtggttcttccaatttcaaaagcatgatatttctactgtataaataagtacagtgcctaagaactaaaatgttgaccccactaatttatttagtaaacagttatttgctgcttatactgtaacagctctctggagtgcctttgcttatgattgctcttcctgttcatttctcctgcctccacttccgccctctaccatctccctctgctttcactcctctcccttttctaaaatcatcctggatgtgtggttattaaaccttttagggtttcagatcctttagagaatataatacctataatttctggagatttccagccctctggaaatctaccagcttcagaactccacttcagagtatattcttttcaggatgtggcagatcaacccattctcactttctttcttcttttataaatgtaaaaatagaggcagggtcttgctattttgcccaggctggcctcgaactcctggcctcaagtgatcctccacctgggactcccaaagtgctgggattacaggtgtgagccatcatgcccggctccattcccactttcaaattcagctttcttcttgagctcctgcttccgtttgctccccctcatttgctcttctggcagaactgtccatagacaccttttcagtctggggagctgatggggtgttttcttgtactgatgttgccggctcattcccctctctgggttgtgtcaagaccatttatttctcttccaggatgctgcgacctcaggtgaaagaggagatcatctgcatgattcagaacactttcaactttagtcttaaacagtccaagcaccttttccaaattctaatggagtgtatggttcacagggattgtgtgagtatgacgagttgatgattcaactgacttaagaactgctaatttataaacactgtaatatttattttcacaattaaaaaaaaacatggtggacacaggaaggggaacaacatacaggggcctgtcagggtggaggggggagggagaaaatcaggataaatagctaatgcatggagatcttaatacctaagtgatgggttgataggtgcagcaaaccaccatggcacacatttacctgtgtaacaaacctgcacatcctgcacatgtatcccagaacttaaaataaagtaaaattatttaaaattaaaataataaaaaataaaaaatgtggatttttcattttgattttgagtgtatctagctctacagaatttgattcttcgttgagtaaacttgacttcttgctgtcactgctgtccgcactctccatgcttcaaatactagactctactacagaaaaagcacttagtataacaatgttccagaaaagttatcagatttagtgaaaattacacagaagtattttcagagggtaaaggaacagctccatgtcttcaatgaacacagcttcatggtgctgagttacatgactgcctcacagcgtcctgagtaaatcctgcaggaaatcattgggaatgtactggacaatgggaaaagtgagaataaactctgggataaaaaatggagcccacaaactatgggctattaccataatgtagactcaggaaaagtttttagtgttttagggtactgtgataaaaagattaatttatttaattaatttatttggtaaagacaaggtcttgctcttttgcccaggctggaatgcagtggtgcagtcatagctcactgcagccttgaatttctgggctcaagtgatcctcttgccttggtctcctaaagtgctgggattataggcatgagccaccatggccagcctatgaacaaaatgacttggatgatatgaattatcaattcttttttttttttttgagacagggcctcactctgtcacctaggctggagtgcagtggcgagatcttggctcgctgcaacctccacctcctaggctcaagtgattctcatgcttcagcctcctgagtagcttggactacaggtgcatgccaccatgcctggctaatttttgtattttttggtagagatggggtttcaccatgttggccaagctggtctcgaactcctggcctcaagcgatctgcctgtctcggcctcccaaagttctgggattgcaggcataagccactgtgcccggctgaattatcaattcatatcaatgactcagatgatatgaagctgacaattacagtaaatatacagatatgtcatgattcaaggtgatctttctagaatctgaaggctggagcaaattgtataagaattttggtaatatttgagtacctggcctcaaaaaaaaaaaccaactgaagtgttctggctagaggaagcatgacgaaatctatgtggaaaactctttggggttttagttggcccaataacaacaataatagcaaccatgtttctaattagcagcatgcttctaaatgtattcttttcatttgaaatagccctgtgagtgagttcagtatggcagtggttatttccagtttggaaatgatgaagcagaaggctagagaatttaagggatttgcagtcatgcagttaagaaatgacagatatgctcggacacgttggctcacgcctataatcccagcactttgggaggccgaagtgggtggatcacctgacatcaggagtttgagaccagcctggccaacatggtgaaaccctgtctctaccaaaaatgcaaaaattagccaggcatagtggcgggtgcctataatcccagctacttgggaggcttaggcaggagaatcgcttgaacccgggaggcagaggttgcggtgagccgaaatcgcaccattgcactccagcctgggcaacaagagcaaaaccctgtctcaaaaaaaaaaaaaaaaaaaaaaaaaagaaatgatagatctgaaacgtgagtttcagaagagttgaaatcttcttagtctattgcactttctatttgccacagtaatcagtaagttaagaaaaggacaggtaaagggattgcccttatgtttgcctcttcttgccatcaagcagaataattaataagcaatgtaatgaccaagagggtcaagagaaggcagcaaagggcttgcaggtgataggaattgggttgtacaattgaggactgattttattcgtgcacatagagggcgtgtcaggtgaaaggaaacaatgtgtgaagttatagaagcatagttttttatctttatgataccttagagattattcaacaggttcctctcattttatggatgaggagcctgagattcagcagcagcctcaagatatttacctaggactagcttgttagtggcatacttgggactaggtcttgccaatcttggctttttcattaaaatagctccttctactatatgaaatgtattttaatttaaaaagactgagatatagccattaataacaggtgactccccccccctttttttgaagcaacaaaagcagagatttattgaaaatgaaagcacaccccacagggtgggaacgggtgagcaagtgcctcaagggcccataggtgaccctttggaaccataagtaacgaacttacttgtctttaaaagagtcaaagaccgtctgtgttgcccagggtacttgctcattgggtccactgtaattacctcagttattttatgacaaacccttgaggattcatttctcgtaaaaaagcaagtctggctgggcgtggtgactcgcctgtaatcccagcactttgggaggctgagaccggaggatcgcctgagcccaggaaattcaagaccagcttgggcaatatagtgagaccttgtctctacaaaaaattaagaaaagagaaaaaaaagcaaaagtcttagtttccaaggctaggtgaatgaaggatttcattcgttgtctctttgaaaggagacatgattttatttacatcagaaattaacattgaggttctttttgttgtagcatgtacatagtaaattcatgtaataacattctttcataaatgtttcctctggatatgtggaatttttagttttttcccccccaagtgcccataattctttgttaccctatttaaaagttttctctcctgtaagtaaaaaaaggttttaaagaagaatgttttcctcaattcattagctccagtctgaattctgtgggtactctttgaaagcatttatttggtagttccccaaatgtatggctctctgtttttcactgttgtagattaccatatttgatgctgactctgaagagcagcaagacctggacttagcaatcctaacagctttgctgaagggtgagtatctggatggggttgcaattgttcctcatttacgcttctcatgttccacagtactttgtgcttcttgcgtagatatcttgaaaagaatatatgattgttcctttcttttaccctaggcacaaatttatcagcgtcagagcaattaaatctggcaatggcttgggacagggtggacattgccaagaaacatatcctaatttatgaacaacactggaaggtatagtgaaaatgaagttattcggaaaaaatattttgtgtgatggtctgttaggaaggggcaaaagagaaaatgagaggagatattgattggtttggtagaagtgtggggtagcatctctgtagctgggatagctaagacacttttcccatcgactttgccttcctgaaaaccatctgttttttttttttttttttttttttcctggctctgcaatctacctgaagctgaaaagggaagttgagtgaaagacagaatggaaggtttttattttaatatatttatgttattttatttttagacacaagttctcactctgttgcccaggatgtcatgcaatggtatgatcatagctcactgtaacctttaactcctggggtcaggtaatcctcccccattagcctcctgagtagctgggaccacaggcgcatgccaccatgcccaactaatttctttggaaattgtattttattttattatttgagacaacgacttgttatattgcccaggctggtcttgaactcctggcctcaaatgatcttgctaccttggtctcccaaagtgccagaattacaggcgtgagccactgtgcctggcgtacaatttttaatttatttttgggtagatttctatcttgttatttaaaactcaaagtttactttttgctttaaaatgtagtaggtgctcacattagaaattagtgaaaacataaaaaagaagaaagattacccataatgctaatgataatcactattaacattcattttaaaagattatagttgtggctgtattacaggtatattatttttgggccaagctaatacatgcacattgtttaaaatatcaaatgatattaaaaggcaattttaaaagatggtagttctctgccctgctaatcacaagagctagtacttaagatgtttttgatttttctaacacttataaatctccatatttctaaataatgtcatattgctatattttggttcatttagtttcagaaatttttcaacacttctgtcttgtgggcctcacggctgcaatgtggaccagtttccttctcctcctggtgcacagctgtcatcccgggatgcaccctcatcatcttggggattcccttgcctctttcccatgttagagggcatgtcttctatgtccttgtcttcctctttgtttactcattcattttgatggtatacatgtgtcaataagttcctgagaaagggagtatgagagatacatattttgaggacttacatgtttgggtgtattttaattcatgatttaaactattttttcctacagaaatttgaatgcctagtttccagcacccagaatttctattgagaagtaaacacttcttttttgttttcagattctttgtcaccatttttttttcctatctggaagttaaaaaaatctttcttttccagtgttatgctgtgtgttgttgtgagtctctgtatccattttgttgggcacatgatttcaacttggcaatcatatgttttcattgcattccattcccttctcttccgtaacacccccaacctttgttctcttttgtaattcctattatttgaatattggaccttatggactgctcctctaatattcttatctctttcctcccatgttccctatctttcctttggtagctttgctggactttatttttttattttaattttaataatcaattaactaatttatttatttttgagatagggtctcactctgtcacctatactggagtgcagttgcatgatctcggctcacttcaacctccacctcccacaccaagcaatcctcccacctcagcctcctgagtagctgggaccacaggtgtgtgccactacaccaggctaatttttgtatttttagtagagacaggggtttgccatgttggctaggctggtcgaactcctaggctcaagcaatccacctgcctcagcctcccaaagtgctgggattataggctgagcctcaactttaattttcaagccttctatgaagcttttcttttctggtagcatactatgaatctattaatttcttctttttttagtttttaatttttgtgtgctcacagtgggtgtatatatttatggggtgtctgggatattttgatacaggcatacaatgtgtaataatcacatcaaagtaaatgaggtatccatcccctcaagcatttgtcctttgttacaaacaatccaattataatacttaattattttaaaatgtacaattaaattattattgactatagtcattctgttgtgctatcaaatactagatcttattcattctttctaactattttttggtacctattaattatcccccttatccccctcagtactcttcccagcttctggtaaccatccttctgctctccatctccatggattcaattgttttcattttcagctcctacgaattattgagcacatgtaaatttgtctttctatgcctggcagtctattaatttgtgacagcaaacttgctccctgattgcaccctcccctatgtttttcattagcatccagaatccaatattttctttttctttgagatggagtctcactctgtggcccaggctggagtgcagtggtacaatcttggcttattgcaatgtccacctctcagattcaagcaattctcctgcctcagcttcccgagtagctgggattacaggttcctgccaccacacctggctaatttttgtatttttagtagagatggagtttcaccatgttggccaggctggtttcgaactcctgaccacaggtgatatgcctgcctcagcctcccaaagtgctgggattataggcgtgagcccctgtgcccggcccagaatacgatatcttcttttacctttttgaggatatgaatgagagctcttttgaagttttcttcttcttggattgtctgcttcctgctagttgatgttttttgatctgtttgttttggtctttttgtttaagtgtagcggataaaaaactctttggaaattccgagcctgtagttggaggttgcctataggtttgagtttcacagtagggtgatctgactgccattagttcaggggcccccagataccaacatattcatgtcttttctcttgtattggtgacattatcagaaaagaatcctctagttccctgactggaaggtgtaagccttgttgctagtgttatgggactcaaaggggaaagatgactggaaagaccccaacattagggattcagcatgtatacatgtattttgtttttgttggaattctgtagtataaatctgtttgtctcttgacattttccacttctactatttggctttctggtgactgctcagtcaattatgacttgaccatctgctttccagcttccaaaatgttgcattcttgtctccactcttgtcctccttgtccttgtagatttattttgtaacaaaaatccctttactgtagttttaatgaagttttgagtgggagaaaaattagatgagcatgttcaacttgccatttgtgcctagaagccaggtagagtctaaatggacacatgacaagtaacaaaaacaaaagaagaagaagaaaccttgaatgtctatcagaattgcattaagcctgtacattcattcatttgggaagcttcgagatctttacaataatcagttttcccatccaagtacatgggatgttctttgatttattcaagatgtcttcacttaagtcctgcacatttcttagtaagactatttattcattcattcattcattcaagacagggtcttgccctgttgcccaggctggagtgtagtgatgcattcatggcttactgcagccttgaccccttgggctcaattggtcctcccacctcagcctcccaattagctgggaccacaggtgcatgccactatgcctggctaatttttgtatttttcgtagagacagggttttgctgtgttgccaaggctggtttggaacacctaaactcaagcaatccacctgcctcagcctccaagggtgctaggattacaggtgtgcgccactgagcctggcctagtaagactgtatttaaattttttccttttttttttttttctgtacccactgatggcaggattttattttaaaattattgtgtttgtgtaattttgagttcaaaaacatgtaattctttagttatttctactttcttaattgtctttatatttcttatttgtgctttctgaagcctgatgccctggaacaagcaatgtcagatgctttagtgatggatcgggtggattttgtgaagctcttaatagaatatggagtgaacctccatcgctttcttaccatccctcgactggaagagctctacaatacagtgagtatggaacatttcatcaatcatttccctccagattcaagaagagcaaggatcatcaagcagaccatgcagaggcaaaactccttatctgaggaaattagaagtagctggacttccctattatctgaagctggatctagttccaggcttctttccccaacatttataagtaactagaatttctgtacatcttcaaaatgcatacatgttaaaactcattgtgcaacccttcctgacatgaaggcaccaaaatggctacaaatgcaatcatttatcatgacctacatggctaacatggttcaaattacccttaagctcccactttaaggtccataaatactcctgaggaaaatccactgctgtgagctcagttctctcttgctgaagctcccttctgcactcttctccagcattctttccttctaataaaacgttcctttttcaaaatctatactgttgtcagtaaattattcttactacctgcaagccagtcactttccattgccaggggtctgacaccttgcctggtaattatttattgatcagcttaagacttatttatctccttgaatattcttgtacaaagatagtttatagatagactcttcaaccaaaggagaaacattcttaccaattctattttatcctagtaaaacatagttaaagactaaattgtgaataagaacaaattaccttttattgagttattggaagtatctcaacctaaggccactattaaaatactgttcctgtacctttcccatgtaaaccctttgttgaaactagcctgacttacacactgtgaaaacaccaattgctcaagccatggacacttcttgaaatagccttccttgtcctttaaatcttattctttcttcaatgatttattcaagtcttgtcttcttgattactgcagttagttcacagtgatttgttcctagagtaccaattatttgtaactctttttgagcccacacatattgttggttattttttagtgtaagtagccactcttttctattattataaacactccaggaaaatagtgcttatatttgtcattgaatccctaattgaatatagtaagtattcaataaatatttgttgctggaatgtgctcgtgtgataggatttgtaattgtatgataaaggatagtaataaattacctaagattcatttctatctcttatcacataaagtctttattatctacatatttgcatcttgctttgaaaaatatttcatataaatacatcttctcttggaaaacaccttctttagaattaattggcttaagcattgttactaaaaatattgaacacaattttcagtattctcagttacttatgcattctgaagtaaaggttttaccccccagcacatggtaattaaagagaataattcttccttttgttctttatttcagaaacaaggacctactaatacactcttgcatcatctcgtccaagatgtgaaacaggtaacctaattaagaaggcgtgaacatgtctttgtgtattgccttagctttgtgttggaggagtcactgaattttgctttgtaaaatgcagatttggattgttttgttaattacctatcttctttaccttgatttgaacaagttcatcaacaaaccacattcgtacacttttttccttaatttactttatgttttaaaagacttgatccatcagttaggtgatatttgctaataaaaagccatgaatcagagacatgcaatgcttctaatcagaacttcagcttaccccgataccgtggtggtgcctatgatgatgataccagctggaaataaataactttgtggttgtgttatccttattggaggactaatatgtgatttccattgtttttgatatcagtgatagttctggcactctcttgctgcttttgtgagtctgcattgttctaggcagtcaggtggttcccctccctgttctatactcttggtcatgttttgctcatggtgttctcactgaactgtgagttaggtcaaacttaaagtatttgatttcccattagttaccaaagccttccaactttaacaaacttttatacctcagtttcttttctttccattaccagtgacttttatccacatcccctgaaaattgggagtactttttatttatttgtcactatggttaaaatccaaggcacatttttaaaattctcttgtttttccaaagtctgatatcttgttagaaggaatgtgagctttcagtttatgttgacgtggagagagagccagagtgaaaggaagacatatccttgttttttttttttttttttttttttttgagatggagttttgctcttgcccaggctggagtgcaatgatgggatcttggctcactgcaacctccgcctcttggttcaagtgattctcctgcctcagcctcctgaatagctgggactacagatgcctgccaccacacccggcaacttttctgtatttttggtagacgtggggtttcaccatgttggccaggctggtctcgaactcctgaccgcaggtgatccacccgccttggtctcccaaagtgctgggattacaggcatggtccatcgtgctccacctattccttggcaaattagcagtaagcaaaagtgtccgtgctcatgtaaatttagtttgtattgatttatgcaatataaaaatgattttatttattttttttaaactgtgccacagtaaactgaaaaaaagtgatgaactaggttaaatatgttctaactagcagcaataagagcattacttttggcattccttgaaaaaagtaaattatgcatgtgaaaaagaaaaattaaattatttacattcattcatatataaccttatttcttgttccaagctttgtgaatattagtcacaatcttcatttcggagaccttgttcaacactctgtgtgcctttaaaaatttactataaatgggcagtttaaaagtgaacagttatgaagaggtagtaaggtgcaatttaagtagtcaaaataattttcatttagactaagacccacatacttggaaatctaccactcagccctcctgccaaccaatcataacacttgtcttggcacagcctcatggttttgtttgtttgttttgctttattgcaatattctctttattgtggtggtctcgaactgaacccgcaatatctctaaggtatgcctgtatggagtttcagatagttactcagcttggccaagtgcatatgctaaactctgggtagacaaagacagaccctttcacatagtctgtaaaggaagacagacatgcaagctgacaacttcaatacccttgtaatatatcctgtgggattttggaccataggcaaagtggattatagacacaaagacccccaaatatgccctgaaatatagaaaacactatactgtctatactggattaagttcaattcaaggaagaacgtggctgcataagcctcatgttttggtattgaatttgactttgtcattctatattccttgttttcatttgttctacttcctcccatattcttgttttacatatgatgtagtcaacgcagtgcaaagtgttatatccatttcaacaaagagagaagctgaaaagctaacccaatgttaattttggatcacacacattcagtgtagactttaagattttacttctgttggagtagctatattatttctagttaaaaaactctctatatacatatttatttgtttttctacttgtttaatatttttctcttccaattaggaactcaatatggaataaaaaatatttaaatgtattttactcaaacgtgtgtgtatatatgtttgtgtgcatgataaggagagtgagagcaagagtaagagagagagagcacgcatagatggaagcacacatttaatgtctatgaaatgagaaaacattaaggctaagatatttttccttctgaactagcagattgtatcaatggctggtcacttaaattaatcagtttgtaaagatatttaaaaggtatgtctaccttcttgcaattaatttgattatgttctaatggcatggcaagagaaatgaaagaagataactaaaagttaaaagtcgttgcatgtttttgttgcagcatacccttctttcaggctaccgaataaccttgattgacattggattagtagtagaatacctcattggtagagcatatcgcagcaactacactagaaaacatttcagagccctctacaacaacctctacagaaaatacaaggtagagtaattgaaaagtgcccaagtaaaattgagaatgattaggaattgttgttttggaaaaatggccttggaagttcagacaaaaatagctcctaaaatggtcattttatttatggacatttgttatctgctgtatgtgaagtatactgtactaagtgttgcagtgttggcttgggatgcgtaaggatcagaagtttagaaactcttaaacagatttatgagtaactagccataatacaaaacagtatataatacatgctatagtgacatagaaataatgtgatgaggcaggttagagggagagatgactagttctttttttttcttttctttttttcttccgaaaatactgatatcaaaagcttaatcagattagatatgtaaactcatcctagtccatagtctggagataacaaacttggtataagcatgtagtgattatattgaaagatgcgtgtagaatatccttaaaaacataagtgatacatattttattttccatgatagttttgagaatctaggaatgtaaaattagagttgttggttagtagttagcagaggaaacattgcctatttcttgaaattgccattatggattagcaacctgaggagactcattcttattagaagatgaggggaggattagaaaatgtagttttgggtatttttgttgagagaagagaaggagcagtaaagggcacagcctttggatattcaggtatgtttctgctgtgacaaggagacctttgttgctggagaatcagtgtcatatggttttaagggaggagactggaaaggcagtttggggtaagattccataaacagcctagaatatcaagctacttgggatcctttataaagaatcaagtgacgtgaaagcccagcttggctttcagaaatgaaaaagcaaaacaggaaagccaaatctgacacagaaaaatgttctctattaagatttcaaaggcataaggatacacttaaggaggtatcagctacttcatttaaacagaacagacattgctgtgaggttcccagtgacaagtaggaggactgactgtggcgctggtgcagcccagtgtggagcttgctagggaagttcccttagtgccctttctttaaatggcctgccagtacgaagtcacccatttcttggattgtcttccagtggagtgcagagtttattgtgtgtcatattaaactagactgtagtagttacaagcacatgattttggagtcaagagacatctggctaggactgcctccaattttgctctttagtagctgtgtaatcttgaacaataagcttaacttctctgtgcatgttttctcatctataaatgggaatagtaatgacccttttataaatttgtcagaaggattaaataatatatgaaaaatccatgttcctgatacacagagggtgcagagtcatcgttagtaataatggtcattatgataattactataatgacactattaattcatattacaatagtaataataatttgggtgttgcctttaaaaagtcttcacctcatcatttctatgttcaatttttatcaacaaaacagaaacttaaataaagcagttcaaagcctgtagtttgggctgggcatggtggctcacgcctgtaatcccaagactttgggaggccaaggcaggaggattgcttgagcccaggaattcgagaccagcctgggcaacacggtgagatccagtctctaaataaataaataaataaataaataaatacaataaatttttaaaaagcctatggtttttttttctcagttgtattttttaatggaaaattttaaacatacaaaaatagagaatagtataatgaatccacatgtacctatcactcagtttcaataatagcaacaatggccaacctcctgcccccagattatttaagatcaaatcttacatcatatcatttcattcataaattcttgtgaatatctctaaatgaaatgtacttaggaaaatgtaattatgatgccattatcatacataaaaaatgaataattccttaatataatcaatgaataattccttaatataatgaaatatccaatcaacattcacaatgctttctgattcagctgtgagggtttcaatttaagcagttccagcttttctgaactggtctaactactgcttgcttgcatttgactctttgtgttttctgtattaagacttccaacctcaaaataggcaggcacttttttttttccagtcgtcttttcgatacttaagaaaaaccaactagggctctcctcacctcctcctcatccccaagtcattataccaccctaatgcctgcctggggctcctgggcatccctgccacagtcacccaggtatagtttgctttaaggacaccaatgatcttaaacttcaactttcaaattttcgtccaggtgaaaatgtgaaaaattcacattcacagatagcacgtatttgtcacattctgagacatgttacttaagcaacatctcagttctatggcctcctcatttggttctggagtagcattgtctgaaaattgtttctattttctttataagtttcctcagtaatgagggagtaatttctgggattagcggccagagccactctttactgaacctgtgggctcttagtgtgggcagattatctagtggtaaacgttctccctcaacaagtgaagacattcctttttaagaaattgcattacagagcataggtttgcggatgatcttccaaatcaatagcaaggtgaaaatgaatctgtatttcttcctaggagaatgacttaagtatcaaaaactaacagaggccttaggaaaaatggaaacattcatgccaaaagcatcctgtttatggttttgcctctaaagttaaccacaaattaggattggagattttatccaattatgttagaaaaattacttgattcagtctttgctcatttgaaggagttgtgctcagttgcaatgatcatttaacctttgttacagctaatgtaaaattaaactaattttaattagtctttaattgtttaagatgacatttcaaacaaaatttttattatttttctattaaaaagttctccctctttaaactttattttccataaatatttataatcattcatttgctatgtgcatattttgggattttttgtgcttcggacttttctttttttagaaactgatgtttattttacattaagcttatttccatgttgcttacgagcccgtgcaagggcagcttaagaccattcagtggttgcttctacccattcagtggcctgagcagtgggagctgcagaccggtcttccatggcaggctgagagctccagtcttcagtagggaactgctgaatagtcacagaggacaccttcatgccttcagaccagtttgtaacctcaggctgagtagcagtgaactcaggagctgaagcagtccattcaccctgaaattcctccttggtcaccgcgtttgcagcagcagcctgctcttctttttcaatctcttcaggatctctgtagaaatagagatcaggcaagcttatggtttttatcatattttatgttagtccctttaagaatgcttctttttgtttttgtatcttgttgatgaaaacttcctgctaatggcaatgagttgtgttgttattgggcctggccactggagttccagtggagatattatataatacctgagaaattccataactttctgacttaaccttaaccttggaactgcttgtgaatgggaattttttcttatcagaactgtaaatctttattgcctattttgaactcgttccagggagagaacatccattcattctaatggaatttccacgtagtgaaggtatgcagatatataatagggaacaaaagagtgtgttctctaagatgttaggaaataacaaaatgcacaatgagatcattagaggctcttgttgggtgctaatcatggagagaaacagaggcatggatatttggtaggacacaacattatatttggttttcattattgtctagaaataaaatattgttaccactataatctcccctccttttgttttattttaaaaataaaataataacgtgccagagagtgaccagctttgttcaaaacctttcccagcaccagagacactcctcaggaaatagaaatgagtctgcagaaagtacgctgcactcccagttcattagaactgcacagccatacaaattcaaggtaccatttacttgtttttcaacttgaaaggaaaatgttttttgcagctcgagactgtttcttcatttacatcaaagaaagggaggtgcaaatagagggaccatttataagtgccataaacagatggtgcaagtcaaaagcataacacagctgtccagtaacaacagtgagcaaaggcacagtgattctctggacttgcactttagcctctcttccttgctgctatccctgctgtgtctagacagtgactcagtcaggtgatctatgggatggtacttaaaaaatgtgatcattaacccaacaccatactcttatgtgctgttccctaaggccagttggatgtgaagtctgtttccttcttttcttcacttctctgccgcattgactttttgcatctttttttaaaaattttttcctttttgaggctttcttgaaattattatgaatctaatattacagtatgacaatgatgatgagtgtgtgtgtgtgtgtgtgtgtacaacattgttattcctcctagtctcatactcctccagtcccactttactctgagaataaatgcttttgctcaagaatttccatgcaaatggttattatgttagctgaaagaggtttgctttccatagctcctggtatgaaagaggtattttataaaattactcttggtcatcatcaatgaacatgaattccttttatttatagaaatagaggaaatggattataattttttgctaagacctctcaaattaaaaggagtaattattgaatctttagtatttgccaggcattatactgagtgcttggttgaacttggaaggtgggtggggaggggaggatataattgtgtccgagaaatggtctcatcttcctcaaagtcataaccgtagtgcagtatgatgagcccagagataaagacacacaaagtgatgatacaggattatgtgaggaggtagaatggcatgatgaatggggatttatcaggtggagaatggtatttcatgatcacctgttacctttgctgataaatataatcagaataaaggaaaagaaacttcaaatcaatctatttggatacatgttggctacactagggatgttttcccaaagggaagataatgaatctatttgctaagtgaggttagagctttttaaaaatacatcactcccatgtatccaatacgctatttcgacccatttccttgagaaactaaaagttgtcatgtagtctctatttcagcactcatcgtactgctctgtggttattactttgaggaagatggaaccatttctcaggcattgttatgtctccccctacccacccatctttcaaattcaattaagcactctgggtatatcctaaagaggcactgctttaagttatgctaaatgaccttaagatatatcagttcagggactctggatctgttaaatgcaacaagaagtagattaccttttatggtctaaattttgcttgctggcttgtaaaatcttattattatttccatctcttttttagtagtgattaaaaaaaatctctaggacacctgctgtgttgaattaggtaaaacatcatacatctgagtatttgaaaactcattcctattttattttccaacaggaaaagtctatagtccttcataaatcaaggaagaagtcaaaagaacaaaatgtatcagatgaccctgagtctactggctttctttacccttacaatgacctgctggtttgggctgtgctgatgaaaaggcagaagatggctatgttcttctggcagcatggagaggaggccacggttaaagccgtgattgcgtgtatcctctaccgggcaatggcccatgaagctaaggagagtcacatggtggatgatgcctcagaagagttgaagaattactcaaagtaagtgttctctcttcacttcatactaaacatcaacacttcttagaatggttagacacttttatctctctcatctttaaacttgtaggacaaatggacttaccgccatgcattttatggactctcctgttaaaagggtcttcaggtattctaaggagctttgtgaagtaaagaaaagagaggtgaccttcaagtcaggggacttgggttctagtccagctgttgactaattagacaagtcagttgaccagatttcggggctttagtttcctaactatgaaatgttcaattaatgattttgaaagctccccctaactctagaagtctttgatgctaaattaaattaagacattgttttcattaagtatctctcaggtgggaaaacaaataaatgcattgtcttaaagagccagagagtaatggtggaaaatagaagttaaaaatgcttttggttttgaagttactaaagtgttatagtaatgaagaaagaatgaaagctagaatcaatggaaactaatttataattttgatgtaaaaattcccaggctggaggcagaggttgcagtgaactgagatcgtgccactgcactccagcctggcgacagagtgagactccgtcaataaaaaaaaaaaaaaaaaaaaaaaaaaaaaaaattcccaggcttggtgcagtggctcacacctttaatctcagcactttgggacaccaaggtgggaggattgattgaggctaggagttcaagaccagcctgggcaacacagcaagaccctgtctctaccaaaaagacaaattccagagcatgacaatgtctacctttcagaggaaacattctcctcgaaaatcacatgggggtgtctctaggtctaggtctatagctttcttaagtcatgtagatattttataaaatcttaaaaaaacaagtgactccacagctttccttacttgctagttgggttctgaatagttttttttgtcaaaaaaaaaaaaaaaaacacactttattaggtcttatcagggagtcccaaacaaaccaagctatgtataagcctatgtataagtcccaaaccaagctatgtccaatagtgtggagtggctactccctatgaatagctcaggtgtaaattaaattctgtatgctacaatgtaaacctcctagttctgttccttcaggaaagggagaaaaatccctttcctgagctgtaattcctttcaaatagtttctggaaactaagattattaagttgctgtttggtgttgttggctttttttttttttttaaaggaagccttatgaattgatattttctgagcctcacatccaatcttttacaatgtttctaaatgttctaaaatgtttctaataatgcagctctctcacctgcctttgttttcttaattggccaccctcatggcagacagtttggccagctggctctggacttgttggagaaggcattcaagcagaatgagcgcatggccatgacgctgttgacgtatgaactcaggaactggagcaattcgacctgccttaaactggccgtgtcgggaggattacgaccctttgtttcacatacttgtacccagatgctactgacagacatgtggatggggaggctgaaaatgaggaaaaactcttggttaaaggtaaatttactttacttgtcttatggagtttaatgttagtcttgtataaaattctgtactcgagttacattttgttccagaattgtgtcttcaggaaaaccagttaatatatttgagagctcatttggaggttctagcaggggactgcagctactcgtatacccttgacagaagattggtcttcctctatcggggatggtcgtcttctgcgactgagcgacagagcgtgcagctttgggagggatgcacatggagtggtgagggaggaaggggacacctgcctagccagccagatcagctgaatcaaccctggcgatcaatggggtgacagatgtcacagccagatcgccctcacatcctagttaatatatttgattctcacagaagatctggggtcttcccagaggaatctgtgaagacgacttttatctcccatggccacagtttccttttgaaaaatgggtataattttacctgccctgtccaccacaaaggtgagggtgcttacacattaaaagcatagacaaacatgcaagatttcattattactagttgctattgcctccaataattacaacaaaagtaaatgagactttttactgaatttttttctcggtgtaagaatactaacagataataaactaaatagaattaataacttctgttgttctgcttacccaatgtgtgtgtgtgtgtgtgtgtgtatgtgtgtgtgtttttttttgagagaataagtgactgtttcataaggctgccctccaatacatttgttcatatgactaaccatctcaaatttctcagcctcatctattatcttaaattatcaagaataatttagttgactgctaaggacatttaatctttgacatcaaacctaagtctaaaggctttaggttatggacaagcttaaggagtacatatacttatgaaaccaaataaataaaaagagacaaagagtgactattaagaactacataagtctgtattttatattttaattttatttttcctagagttcttaaaaatatgatgtgtcccaaacatgactatttttccactgatgaaattatagaaataagagaaatgtcaaccaaaaaggatctcaacataaatccttttaaagaaaatatcagaaacaataattgttttcagaagttctccaatgatttgctttgattgcacccttggaactgaggaatcagagatgtgaatgggttcacctctagctacataagttcaatgttcagggagtgagataagatatagatagctggtagtttgagaaataattttcctcatgtttctgtcctgtatatactctagtttactagaaatccttatttctgagaacttaatgaattcttgttcttcatatacttcataccaaaaaggagacttgtgaagtaagactaaatgttttgccccaaaagatagagtgagttaataataaaaaaggctgagttagctacttaaagtctctaagctgcagtaaacattcttctccagtgtttagatgctactttatcagtgcttggttggtgagttttagaaacacatttgcaaataattgtgagatgtcctggctaggctaattccaagtagaagaatactgtaggaaaaccatgtagagagatgtggatgggaaaactcattgtaatgctccatcaaatcccttagagatgggatactgatgttgtcaaatactatttcataagccagctgttctgcaatgcacaagggcaatagaatgtggggcctcttcaggaagttgtctagagattaattagtacaatattaccactgggcatgataactgcgatttttccagacctagaagattgcacgtattttgggttgtacatctggacaaaaaacaaacacacaaataaaatcctattagaactggagaaagtccagagaatcttcctaggagatcaagctttaaaacagggtgacaaaagataatttcatcatgaaaaaaaaaaaaagaaggttgacaaggatatgacttcggtttaccatacttaataatgaatgccaactagtcaatttaaatcttctttttcatcactgaataccagaatactaaggcctacttttagcttgaaagaagtagtgttcatcaagttgatatcagagcatttagtaaatcttttaaactctttaccttggaaggccatacaagttgaacttaaaaattttttttgaaaagactgttagtaattaatgaataatagcaatataatgaaaaaaacttgtggatgtctggatctataccctccttgggttttactagtagagaaaagatacgtgtgggatgggagatggatctaacagaaggtgacggtatacttttagattcttgattttataatatcaactaattttaatgtgttttatgtggtaatagctacttaatggctttaaaatattattaaagcagtgtgctcattgaaaaataatacctgtcactgccctgtcctgccactcctagagataaataattacagtgtagtatacatatttttaaacgtttaaatacatatttatatgcatataaatagctaagatttttaattttattttttaacaaaaatgggatcactctatgttcttctatacagttggctcttcatatccatgggttccacatctgcagatttaatcaacttcagataaaaaatatttggaaaaacacccccaaataaataacaatacaataaaagttatacaaatgaaaaatcaatatagtacaactatttatatagcatttacattgtattaggtattataagtaatttagagatgctttaaagtatagggtaggatgtgcataggttatatggaaatacaacaccatttgatgtcagggacttgagcagcctcagattttggtatccttggggtcgggggtcaggggtgtcctggctccaatcccctttggacaccaagaggtaactgtaatttgatcttttcacttaacaatatagcgtggctaccttttcattatattcaacattgccttggtctttttaatggttgcacagtattccactattaggttattccagaccagctgtccctctctagatagacatttaggttgacaccagtgttttgcttttccaaatagtcctgcaatgaacattcttatctgcaaatgcttgtactcatgagtatttctgagagaaacactagaactgaagttgccgagtcaaaaaattatttatagaaatgcgatgaaaattgactgggatgggtctggcattttatatacactgaaattcttaattttgttatttgtctagtatgtgcttttgtagtccctactactttgttttgcttttttttcttttacagattattataagcattattttaccacccaccattttgacactggaatttaaaagcaaagctgagatgtcacatgttccccagtcccaggacttccaatttatgtggtattacagtgaccagaacgccagcagttccaaagaaagtgcttctgtggttagtgcaaaatcataatgaactgaattttcattgtattgactgcacgcaaatatacacatccttaaagtttacttatatagccatctattaaacaaaagttatgttgcctatatttcaggcctgtgatgacatatggtcctggggtacattattttaaaatgcctctgaccaatcaagcatttagttctcttaatcttaatcatattatgctatggtcaggtatattatgtacaatagaactaattaagccctgtacacaattaagcaaaatattctatttctacttcaaagccaaaatcaaagacgtggtttggacatagccatataccaatttattaattcaatgactcatttgtggccactttacatgtgctagaggttctgtggacactgaattaattaaggcagatgcagccttttcaactgtggggcttacaatcagaatatccacaatatctcaccattgttcaattaaaacaggtattgaaaaagtgtttcaagtctgttcactataaatggcttataatcataacaacaatctttcttttgtctttgaatttaacttaagcagtaattattaataagctgctatgtttttagaattttctaggcatggtgtaaggggtggaggcagcacttttgatggggtagataagatttcataacactgattaagtaatgcaatttattagttgaggaacataatttgcattacgtattgtggcaggaaactgaaggcaggtgatacttagatgctctttagagtgtcactgtgttgtcttcttgtggtaatagtgggtaataatgaatataaagaaggcacttctggtaattagagaaggaaagccattattctggagctgaagctgtatagcatcaaatactgcatttactcactgaggttttataaaactccttactgaaatttctacaggcagaataactttgccatgtgaaatttagatctttttagctgataacctcttgaaaacatgacctgtgatgacttgagttttcttaggactaaattacagtaagatggcagaatgggttaaccaacagcagaagaagactcttcccattaggagtcagtaggtaaggattaggggttagtgacagttttatgattgggttggtgtttgagcctgacttgacgatgtggtgagggaaaagagcatatcagtgagaaggagactatcaacagggtcatggagttgggaagtggcaaggtatatgtaaagcatcgcaagtggtatggttcagctggaatctaggttatgagggttatgtgacaagctgggagtacttgtaggaatggctggaaagtagattgaggctagatcatgtagaatcttgtatatcctgtgaaggagtatgatttttattctgtaggttacggacagccagtgaatgtgtatgccagagtagtgagatgatctgactattagagaaattattctgcctccagggcataggatggtttagcaagaagactggctggaagcagggtaggccagggtagccatccaggtgagaagcaataagtcctttaacgagagtcagtagcaatggacgtggagaggaagagggtcttttaaacaaggccgtcttgaagggacacaaggataactggagaaggagtgggtttggaaggggaaagatgagctcggtcttagacaggtcgataaatcacagtgaaataatactaagaaagttgtataacaaaatctattctatcagagcataattaagtgggaaatatgactgcaaaacagatatggggggaagacttattgttgtagtcataattttaatctgtgtatcagattacaattagaaaaaaagagtgtggggtggtcagggggtgtggggggtgaggggagctgtatatatataataaaagttattcaagtcacatgtttttgtctttaccttcttctcagtaaaaaaaaatctgaatttatgttctcaggttgtcttcatcatagcaattggtgtctttgaattcaactcagagacaggcccgatcagcactttataattcactccaaactgtcaagagcaattaagagctaatgaaacactcctagaaaaataataagagaagttatttaataataaagtcattacttaaattgctttctggggtctttctgatgtggtgttgatgtcattaaaagctcataaatgatgacttttctaattggttttacaccattttaattctagcctggttcaaacctgctaggaattgggccaattcctacatttctaagtcaatcctaacctcactgcccaaagtgaaataaatgactgaataattaattaggcactgacgataacccatctagatgcccgaggccttaaaagtcacatttttctgcaattatatggacaactcaagcaaaatttgattcattccttggcttaaaaaattttgctaatcttgcaggtctgacattaaagagataacttttgtggctacgttgcaagaatggactagtttgagaggcagcagagaacattcttttcttttaatattactttaaaaaattaaaaattacatgtgtttcctattaaaaaactaaaaccacctagaaatctacacagtagagtgatatcgcttttgctttcctttcgctacccttacattgctgcttcttaaaggtagccaggctataaatgcttcttttcttgtcttgtcttgtctcttcttttcctttttctcttttcttttctcttcctttccttcctcttttcaaagctcattctgcatgggtgtttgtatagtcacattcaggcaactcctgctctgccttacatatactcattgctaattctctacatgagttaattcccttggactgacacatacctttttggtagttgatgaaaaatctgattctttccccagaaaaatgcatgtacaacacaaatacttgcacatggttgcagggtgttcaaggaactctggaagctcagagagcacatgaactgcaggcaaacagaccctctgctataaatcagtggggatgctatcgaaggtcagaatcctaaaactaatgcagtgcctgaatttcctatgacaaggaatggccatgcatcatcaatgtatgctcaatttcttctgtgttaaggaaataattgtattgttcattactgatttcacagggattttaggagtatccttaggttccaaaatttaaaaacatacaaaaattagccaggtgtggtggcgggtgactgtaagcccagctacttgggaggctgaggtatgagaatctcttgaacctgggaggcggaggttggttgcagggagccgagaccacgccattgcaccccagcctgggcgacaagagcaagacttcatctcaaaaaaaaggatattgggaacagggaccaatttttaaatccttggaactattcttactttgggtttgattactacagagtcagcttgtatttcagaaatacctcatgtgttttaactggtcagtaatttatacagtacatgcagttttctctcccttcaaaggtaagattataatttggcatgtgggtgcccaattattattattttttgagacagagtctcactctgtcacccaggctggagtgcggtggcatgatatcggctcactgtaacctctgcctcccgggttcaagcgattcttttgctcagcctcccaagtagttgggattgcagatatgtgccaccacactctacttatttttatatttttagtagaggcagggtttctccatgctggccaggctggtctcgaactcctgacctcagatgatctgcccaccttggcctcccaaagtgctgggattacaggtgtgagccaccgcccccagccaactaatttctaatatattatttatgatattttttggatgttcatgcttgtcactattttagttaagctgctgacaagaaaatgattatttgtttattttatagaaagagtatgatttggaaaggggccatgatgagaaactggatgaaaatcagcattttggtttggaaagtgggcaccaacaccttccgtggaccaggaaagtctatgagttctacagtgctccaattgtcaagttttggttttatacggttggtctcattgcaacaatatatgtcggattaatgatgattgatagctagtgatgatgttgataatatgcctgatttgccactttgcattaaaaatgtagaaacctagttaaaaaaaagtgagggcatgacaaagtaggtagcaaagaggactggaggaaggcagggagaagttagggtggagctcacctactttttggagtttgagaacaagcattttcttctctctttgagtgctaagagttagcactgttattgtgggaagatctagctggctttgccctattgcttagctttgctcctgtctctaaaaactctgagcgagaagtttccacggaaagaaacactggaatattcttttcttaacagtgtgactgtggttaaaactctctcggcactcctatcagagtccctcaagtatgttgttgcacattccacaaaagtggtaaaacctcaccatttgaagggagacagcattcaaagatttgtggaacaaccaaattaatagcagtgtttgtagaattaagcaataggtgggtggattcttcttagaaaatcagcaattgaggccaggcgtggtggctcacgcctgtaattccagcactttgggaggccgaggcgggcagatcacaaggtcaggagattgagaccatcctgggtaacatggtgaaaccccgtctctactaaaaatacaaaaaaagtagccgggcgtgatggcgggcgcctgtagtcccagctactcaggaggctgaggcaggagaatggcgagaaccccagggggcagagcctgcagtgagccgagattgcgccgctacactccagcctgggcaacagagcgagaccccatctcaaaaaaaagaaaatcagcaattgaatcagctttttgtttgtaggaatgtgttatataggtagaaaatgatgcaagtgtttggtttttttgccttcagtagtatatgtttataaatatagagagaaaatgaaaaatgttagaagctgaactgtgtgaacaaatactaaatctattatggatagtagagctacagagaaagcatgagctgtgctttagatgtgtttggtgcttttcacatttatttcatagaattttcttttctttttttttaaatatttttttccgtaacacagccctcaggagatctgagaacatgtgctcccatagcatttatttttctaatgcttatctatacttaaatagctcatggccaagagtttgtatatctaaaacatttgaagtgtgactgtaaaaggatatttatctaaatgtgttgtatttccaaatatttacctggccaaccacacacttatttcctatacttattgaataagtacgtagctgtgtatgatttttatctgtttccaaaaatcacatctgctttcaaacaatgaggttttgctatttttgtaatgcgcaacaacatatacgaaagactctgacaggagtgctgggagagttttaaccatagtcataccattgggaaaagcgtatttaggcatttcttcccttggaaatttctagttcaggagctttaagaaacaggaacaaagctaagcaatagcacaaaaccagccagatctgcccaccatggtgtttttaataattggaaagaaacaaatagagtcagaagcaatactgccaatgtccagagtgtttagtgcttaattttacctaggtgtgagtactttggttgcttgtagcctttatgtgatgccactttggactaaagagtaagtggacttaacatagcctttaggaatccaacctgttctcaagtagaggaattgtgctgctttctcaatctgaatatctacttatcgaatatgtttgtagtcttttgcttataaatcttccagattcgtatagttgtacactatatagaaagaaagttatggctgagggtaacctaagattcaggtcattcaattcgattttactgagacctaactgctgtctttaagacatagtatactaggcagcagaggggcggtgagaagaagacgttgccaaacatcaatactgacctcaaacagcttacagttatgtaggggagaccattaatgtacgtaaatgagtccagtataaggaatcagtataaggagataacaaaatacaaataataaaatatatacagacaaatgggctaaggtctgaacctcggagtaaaagttaaggagtaaattgtctaactatgctgaaaccaatgacaaaaaacttttaagttgcttgaaagaacaaattaacttaaagtgtgtccctaaggagtcatcaaaaaaactcagactttgagatatagaccaagagaagtatagaattattgaaatttacctttactttcttatatgcttctcttctacacttccttaaatcataggcactaatatccattatgactgcctaaaagaccacctattgccaataataccattcttacatagttagaaatggtttaagctattctctatgttatctgtgcagaactaaagttagaagcagacttatccatttaggtagataaaaatgtatgagaaataggaatcaaggttaaaataatatgacttgtgagaatgaacccacacacacacacacacacacacacacacatttttctctcaactgattttctttttttttttttttttttttttttgagatggagtcttgctctgtcacccaggctggagtgcaatggtgcaatctcggctcactgcaacctcggccttctgggttcaagagatgctcttgcctcagtctcctgagtaactgggattacaggtgtgcaccaccatgcctagctaattttttgtatttttagtagagacggggtttcaccatgctggccaggctggtctcgaactcctaacctcaggtgatccacccgccttggcctcccaaagggctgggattataggcatgagccaccgcatccagccgatacaaggtttttaaatgcaagtattgatcagtgagcactgggtgttgtctctgaggctatttagaggactgcagtctcatacattgttgataatagtgtaatttggtaaagcccttctgtcagaaaatttagtaatatttgtcacagttttcaatgcgcatggacagatattctgcttctgggactatatcttaagaagataagaatattaggtaagattacaaagctattaatcactatgtatctatatgtgtgatcactatgtcttaattctttcaagactttggaaatctaggcatacatatatatacacagtaattagacaaacatttattgaatgtctatcatgtgtcaagcagagtgctgagtgctgagtgctgaagatataaatattgacaaacggtccttaattaaaagggctcacagttggacacaacttttctattaaacagagtattttaatcaacataaaatagaactcccagcagtggtaaatgccacagttcattgtatttgaaaataagcatctattgccactgcggatctggcatgcttcacacgttttctttctgtgtttaagatggaggggaagacctgtgattcctcctgggcttgctgttagcttgccagtgcccctgttggatgtgcagggtcctggaaatgccagtcacgagccagcagaaaggcacaatgtgtccttccatgcatctgagaacagtgatttcattcctgcctctaaatcctagactagaacaccatggattgttgtgctttccttgatagtaggtcatcaataacccgaaggtggtcctagttctgtgttcgtgttatcatgttgaagttcatgcctgggtttctgctccatctgcgtctccttggcatgctccatgcttgctctcactcacatctggggaatgtgtgtccccctcacagatggcgtatttggcattcctcatgctgttcacttacaccgtgttggtggagatgcagccccagcccagcgtgcaggagtggcttgttagcatttacatcttcaccaatgctattgaggtggtcagggaggtgagttatgccatctacctttatcttctgcatatgtcctcagcttctgtaggtgtccactgaaagactccttggctctggtgatgaaaatggacatgtcaagggtgggggaagacaggacacactgaccttgacttacatgctgcataaaggttatttgggggagaatccttgattccagccctttatccttgtcagctgctttctgctggttggtgcactttggaagcagttatctttgaagtggatatcttggtgtgtttaccaatcctaaaggatagatgatgccatagaattgtattaaaccctccaactatttgatttccccaagtttttttgtttgtttgtttttgtttggtggggttgatttttgttgcctagcattattttcatattatcaatttcatctaatgagtggcataaatggctgaagttgtgcaatatctaaggaatatgtttatagtttttgaaagctcctaccaaacactttgaaaattgaagctggaaatctctctgaggcaaatagtccaagaaacaaaaaaccaaaacttttaaaaatttctagttcgtaatgagttactttaaaaaaaaaaggagggggccaggcgtggtggcttatgtttgtaatcccagcactttgggaggccgaggcaggcagatcacgaggtcaggagatcgagaccatcttggctaacatggtgaaaccccgtctctactaaaaatacaaaaaattagccgggcatggtggcatgcacctgtaatcccagctacttgggaggctaaggcaggagaattgcttgaatccaggaggtggaggttgcagtgagccaagatcgcaccactgcactccagcctgtgtgacagagcgagactccgtctcaaacaaaaacaaaaacaaaaccaaaaactagcattcctatcagttataactgtaatcataaatatttgtgactcagactgttttagatgtcaatgtatgcctctgtgtctgtgtatttacctatatttattttgtcttagaggtaatataaccaacattgtatacttctttgtaattatacctatgttgcctgctaattcctatgtggagtttatagattatagaaaatcaggagagaaacagatagttatctgaattgtacccttttttttaatgcttcagggaaaatcggtgtactattttacatttctgtttgtctgacacggtgtttcaggggtattttcttatcttagtgagttccaatatcacattctttttttttctttttttttttcttttgagacagagtcttgctctgtcacccaggctggagtgcagtggtgagatctcggctcactgcaacctctgcctcccaggttcaagcagttctcctgccttagcctccggagtagctgggattacaggtgcctgccaccacacccagctaatttttgtatttttagcagagacagggtttcaccatgttggccaggctggtcttgaactcctgacctcaagtgatccacctgcctcggcctcccaaagtgtcgggattacaggcgtgagccactgcacccagcctaatttttgtatttttagtagagacggggtttcatcatgttggccaggctggtctcgaactcctgacctcaagtgatccacctgcctcggcctcccaaagtgttgggattacaggcgtgagccactgcacccggcccaatatcatattcttagtagtttgtcaacaactcactaaatagcagtagtcggactggattacaggattccttgctccatccagtgttctttgcaccctgctgtgcctcctgaaatgaaatcgtagctatacagatccacagcagtattgagttttatttatttgtttatttattttgagacagagcctcgctctgtcacccaggctggagtgcggtggtgcgatttcagctcactgcaagctccgcctcccgggttcatgccattctcctgcctcagactcccgagtagctgggactacaggcacccgcaaccacgcccggctaattttttgtatttttagtagagatggggtttcaccgttttagccaggatgatctcgatctcctgacctccgtgatccacctgcctcggcctcccaaagtgctgggattacaggcatgagccaccgcgcccagcctgcagtattgagttttaaaatgtcttggtgttttctcatgctatttcaggattattgaaagctagaaaaagtgctttctatttttttgacttctagttggagtttcaagtgacaatctggtattatcaaatgacttaaattatatctgtatagcattgtttaaataattcattactgatgataacttaagtctctgaaatccgcaagtgatttaaggtttggcaggttttagattactctttcagtgaatggtttgtgtatttaagaagatcatattgatgggattctttggttgtacctcctttttaaagtttccttcttccttcttttagatctgtatttcagaacctgggaagtttacccaaaaggtgaaggtatggattagtgagtactggaacttaacagaaactgtggccattggcctgttttcagctggcttcgtccttcgatggggtgaccctccttttcacacagcgggaagactgatctactgcatagacatcatattctggttctcacggctcctggacttctttgctgtgaatcaacatgcaggtccatatgtgaccatgattgcaaaaatggtgagtacagtctagttttatatcctggtattcttttttaaaattatttttagccaggtgtggtggctcacacctgtaatcccagcactttgggaggccaaggcgggcggatcacaaggtcaggagatcaagaacatcctggctaacagggtgaaaccccgtctctactaaaaatacaaaaaaattagccgggcatggtggtgggcacctgtagtcccagctactcaggaggctgaggcgggagaatagcacgaacccgggaggcggagcttgcagtgagccgagattgcgccactgcactccagcttgagcgacagagcgagactccatctcaaaaaaaaaaggttttcaaaagaattcttgtgggtacataagtaactgtatgtatttacggggtatatggaatattttgatataggcatacaatgcataataatcacatcagggtaaatggggtattcatcacctcgagcattaatcctttgtgttacaaacaactcacttatactcttttagttatttttaaatgtacatttaattattattaactatagtcaccctgttgttctagtgttctttgtaaagatgctatgttgtgcaggctagatttgaactgttgggctcaagggatcctcccatctcagtgtcctgagtagctgggactataggcatgcaccatcacgcctggcttctttttaatggttcttcatcgtttatatccgatagtttaactttcgaaattattattattattatcatcattatgtgagacagggtcttgctctgtcacctaggctggagtgcagtggtgcgatcacggctcactgcaccctcaccctcccaggctcaagaaatcctcaaccacctgagtaactgggaccacaggcacacaccatcatgccaagctaattattttttattatttatatagacagggtcccactatgttgcccaggctggtctcaaactcctgagctcaaatgatcctcctgcctcagcctcccaaaatgctgggattacaggcatgagccattgtgcctcgctatcttggaattatttatagaagcacagcgagcaagatcatgtcaccactgccttccatataaccacaaactagtattagcaaatgaccttggatagtatattgcatagttagtttgttgggacactcagcttacccttttgattaggaccagatggtatgggattgagtcaaatctgtctctgagcacagtaattcccaaggacgagattcatgtgaggctaccaccaatgatattttctgctaaaatatccgtttattcttgtatcactcactgactctcccctaccatcacactcttaaatcgtgcttactataggccacacactgttctaggtaattagtatgtattaactcatttaatcttagtaacaactttaggagataggtagtattattatacacatttacatacaaggaaatggaggttaagcaaattcctcaaaggaatatatggggagccaggattcaaaattgggccacctagctccagtctgtcacctgagcttgccgtacagttgtgtcagctttttctttttttctttttctttctttttttttttttttctgagatggagtcttgctctgttgtccaggctggagtgcagtggcgcaatctctgctcactgcaacctccacttcctgcgttcaagcgattctcctgcctcagcttcctgagtagcctatagtagggactacaggcacttgccaccatgcccggctaattttttattttttagtagagacggggtttcaccatgttggccaagctagtctcaaactcttgacctcaagtgatccgctcgcctcggcctcccaaagtgctgggattacaggcgtgagctactgagcccggccggctttttccatctggctgttcacaaggacctaagacctacgctttaataagtacagtgtctcaagatcatctttggcttttccttctaggatacttactggcagggaaggggcaagttctggagattgaagggtagtgctgagacaaacaaacaaagaggacagaaaagagacaacctccaggactccaaagatttttcctatttgacatttttctcttagaccagaaatgttttctcttgtcttggtgacattagtctttatgagataggctatgccgagataaccaatatatttcaatgacttagcacaaaggtatttctccctaatgcaaggtttggtgagtgctcatgggggctgtcctctatgcagtgactcaggaatctgggatccctttgtcttgtgacatagctatgtgaacatttagctcctaaggtctatggtagggagtgagagggatggagaaagtctaatggcttttaactgctctggacaagaagtgcccaagtcaccatcaaaccacagcccactggcttgaatacgtttcacagccccagcctaatggaaggaaagctaagagatgtagagtagctcttgaaataatgatgggaattgtggtgagtgctctgtctgttacagtaaactaatggactgagttgatgtacatttagtagatggaattaaactggcttgatcagtttcttagactctaatcaattcctgaagacaattctgggaataaggagccattggactaattcaacaataccctatttttttttttttattttcctaacctatggtccaactgggggcaaacttagatattagctaatcaaaaagtgttcacaattcattactgcttaaacaaagaagcacagattctctcctctcagcacatttatattattccatagaccaagttgacttgaaatgcatactgtgtgagaaaacaagagtttagccaaagaaagtctagctgttcctgcacaagggtgttttagtcaatgactagacaatcttattatttgcaggtatagttatgatggctgctggtgtttggtttcttttgaacttcaaatctgtggtaaaattctggttgtactatgctcttttgcagacagcaaacatgttctatattgtgatcatcatggccatagtcctgctgagctttggagtggcacgcaaggccatcctttcgccaaaagagccaccatcttggagtctagctcgagatattgtatttgagccatactggatgatatacggagaagtctatgctggagaaatagatggtgtgtatgggattttaccgtcatgcagaaattgtgccttcatagttaacaagagtaaaatacatctgaaaaacaatcatctaaatcttaaaaatgtttgaatttatggtattctgtgcagttaatgtgctaaatgtgtgtctagagtggcaggactgtgattcatcttatctttcattcttttaaaattctttatttgtagtttgttcaagccagccatcctgccctcctggttcttttcttactccattcttgcaagctgtctacctcttcgtgcaatatatcatcatggtgaacctgttgattgctttcttcaagtaggttatttcaattaaatatgattatttaaataagaaatgtgggcagatatgttgagtagattcacatgtactttgagtatgtaacctttgatttttgtgtgttctatatttattattattgttttgaaatatgcacataaaactactgataagaaggacatggagcatgggaaacagtgaaataataaatgcagtcatccatcgttatctgtggaggacttgttctaggaccccctgcagataccaaactctatggatgctccagtcccttatagaaaatggtgtagtatttcatataacctaggcacatcctcctgtatactttaaagcatctctaaattctctataatacctaatatagtattaatgcgatgtaaatggttgctatactgtattgttgagggaataatgacaaagataaaacgtctctgcatgttcagcacagacacgatcatccttttcttttccccaaatattttcaatctgtggttatttgaatccacagatgtggaacccgcagatatggagaactgactgtggggggaaagtacaatgtaacaacatcaaaatgcaaggagatcttgagttgtgattaggcagtaagttcgaattatgaaaggatagcaagtgatggaattgcaagttggttaaggagttcttgatatgctttcttcacttgctcccagcttcccctgttctctgttttctctctttctctctctctctttcttcctctcctttcctctcctctcctttcctctctttcgtttccttttcttttcttttcctttctttctttttcttctttttttttttttttttgagatagagtcttgctctgttacccaggctggagtgcagttggtgtgaccccagctcactgcaacctctgcctcctgggttcaagcaattctcctgcctcagcctcccaagtagatgggattacaggcgcctgccaccatgcctggctaatttttgtatttttagtagagacggggtttcaccgtgttgaccaggctggtctcaaattcctgacctcaagtgatccacctgcctctgcctccctaagtgctgggattataggagtgagccactgtgccaggccctctgttttcttctctgtcacttctcactacttctcaatcttcttttctggatcatcttctccccaaccttttaacattggaatgtccctgagcccggacctgcctcttcctttatttatgctttttgtgatctctttcagtttcctgtatatcctgagcacacccaatttatatccccagcccagttctctttcttaaactccagccatggagatccaactggccccttccttcaccagttagaaatttaatagatttctaaaatttaaaatacccaaactcttcatctcccctctttcccaacatacttttatttataatatttaatgtagtctttcccaaatctgtgaggaagaacacgagtttttgttgatgttccagcttttcagttgtttacaccaaaaactaagtagtccttcttactttttctctgctctacaccatgattctgtacatggagtcattcttaatgtctcttgaacctctacctctaaactctcaggaacttctgttaactcaaccttcaaatagataactgatttaatgacctctcactaccccactgttaccacagagcctctaatttatctctctgcttctgtctttgactccctatattcttttctcaacacagtagtccaaatgaccctttaaaagcagacatcagaggatattactcttctgctccaaactcttcagtgcctcccattttacttctgggtaaaagtttaagtcactacaatgacttatatggccccatgtgagttggcttttctgtcacttcgtttttttttttttgagacggagtttcacttttgtcacccaggctagagtgcaatggcacgatctcagctcactgcaacctctgcctcccaggttcaagcaggtgtcctacctcagcctcccaagtggctgggattgcaggtgtgtgccacacacctggctaatttttgtatttctagtagagacagggtttcaccctgttggccaggctggtctcaaattcctgcacccacctcggcctcccaaagtgctgggattacaggtgtgagccaccatgcctggcccctgtcacttttttttttttgagtctctctctgttgtccaggctggactgcactggtgttatctcggctcactgcaacctttgcctcccgggttcaagtgattcttctgcctcagcctcccgagtagctgggactacaggtgcatgccaccacacccggctaatttttgtatttttagtagagacagagtttcaccatattggccaggctggtcttgaactcctgaccttgtgatccgcccaccttggcctcccaaagtgctgggattacaggtgtgagccactgcgcccagccgtcacttcttaaatcatgcatcacactagtcttcccctgacccattcctctccaaccacattggcccctcagtttttcagaccatacaggtgcctttgcacttgctattccctctgcctagaatgcttttcctgcagctaccagtatgggccacttcctcacctcttctcgtcttgctcagaagcaagcaatttacctcaaacactgaaaagagtgcctgacacatatttgtttcctagacaaaagaaaccaagtgaagtaatgggaagaaactcatattttctagatgcctcttaactgtcaggcactgtgctaggtatttgattccttgcttatcttactgaagaggaaaatataacaagtaacaaaagtagggaagacaggggttgagagtcagcaaagtaaatcaaaattcttttaaaaaaaaagtgactgctgtgttgttacctaaacatggggaagacataccttcctgctggttatatgatagtcatcatctctcttagcccaaccattttaggaacttggaatatttgctggtgtttagttataatagctatttttatagatcagataataaaaggatctgagttttttgtgggggcatggggagagatagggattcactctgtcactcaggctggagtggtgcagtggtgtgatctcagttcactgcaacctccgcctccctggttcaagcaatcctcccacctcaacctcccgagtagctgggaccacaggtgcatgccactatgtccagctaaattttgtatttttggtagagacagggtttcaccatgttgcccaggctggtagtctgagatttttgtttattaaaaatgtccagtgtctcactgcccgtttgctctcaggggaaaggctcacaccccgcatcttagccccaggaaggtaagtgggggctgttgatgggatggtgtgatgctcctgctgtgggtgtcaccaggaggctctttggactctttgggaaggagtgttgcctggtgaggtggtgcactcccagtcactaggggtgtacactcgaggttgggtgaacacctgctgctcatggtacccagtgagtcttgcccaagcaggcagctgggcagaggcccttctggatcttggagtccaaagaactgtagagcagcccaaggggtgtgggtcaattttgagtgggagccaagtctgggagcccgtgtgcatcatgtttgggtctggttggcttggccaccactgaaagaagtgataagtatgggctcctggtacctgcagatctcctgcaaacggcccagagaacagccttgaagccacctttcccttccaggggactgaccctgtccctaatgctgcagtggcgtccagggatcagtggaacattgctttgagaactctcctgcctattatggaggcagcacaaagctggtgccccctgagccaacatggcactgggatggctttttaggacagaactctgttggtgacagtcacatctcaaacataatagctgattttaaaagccagcagcagcaaagccatatacctgagtataggtggcagttgcagagagccatgggctggagagggtcagatggggcctcccacagggggatcctgtgggggctgcagctcagagtgactcccagctctgtcactagcagggcgaccccttccttctggagccttagctctgaaaagcccctggtgggggtgccctttcagatgccccctttccatttcaaaggctctgattctcgatcttgaagccaaatgcagcaccgacactcggcttcagtttccactgggacagctggaggtctcctttctagccccagcccaggcggccaagcccatcctggcatcagaacatgctgagcggcattttgtagggtggcacctttttatccaagttgctagctacacatcagtgtttaaagagaaaagagtgacctttcattttttttcttgaaacttgaggaaacaggatacataactactgatttgtttgttcttaaagaaaactaaatgcacgactgcagagtgctagaggtgtgtatttttcatactgtgggggaaagtatttgtgctgctttttggagatatactgggatgtctggtttctgtccccgggcctggcagctacgtctattttctgtagaaggtgccacagtgagacctggagccaccccttcctgccctggcacggtttagagctgggagcctatggactcttggcctgtttctaccttctattcaaccactctgatgtggggagacaaaaagaaatataactttttgatagtgtggtagaaacattgatttgaactattttagtagaaggagtagcaaacaagactgtggtagtgtatactttgagctagataaataaaggcctctttgtgagcctcctggccaacaacaacaacaaatgtccagtgtcaaaaaagaagttgagaaatcctcgcataggacaaatttctcacgttagagatgaacacactgaagaccatacaaagtgaccaaccccagatctgactacttgtccaggagctggttacagacaattctttataaaataattgaaaaaaacaaaaaccaaccaaccaacccccaaaatttaaatacactgttaagtcgccacctgctggtggaaggctgttgtcacgttggagtgaaactgctattaatagcatgtgcaaccctagagtttcccactcattgaccaggccccaaaaatgtgcatttctgacatgttctcaggtgatgctgctgctgctggttcagaaaacatgcttgagaactcctgatataacccagtcatctatgtttcaatcaccttctttatggattctgagaaacttctattcttacccaaagatggctttctccaggataatcctggttccttttctttatcactgttcaagttatgggttatctgtgtttttatttgctaaatttggctgccttcctccagttctactctgctatctttctctaaataaactaaaattttgacactgcaagaagaagaattgttttaaaaagaaactaaattttgttagtctatgcaaaatattaagatggacatcttattttgttcctcttatatcatattatatacttaaagttaagtagttaaggatggtatattgtttcagaataactgtacctccaatcattacccccatggcaagttctataatatcaacattcaccatcctatctccatgttacaactacaaagtgacctaccaataaggagttacttttattgtaaagttaatgtaaataatttgtctggattttaatagaagctctgttttttaagatgaattgattcttcttccgtttcttcactaacactgtactgtttgcatattttaactgggatttttctagcagttctcacatttgacattaggtagatgatacagaggaacattaaagctgtttcccataaacgatgaattatggactgaaaagagcttcttatgtgagaagagatggtgacttgagagtagtgttgagttccagaatggattttctgttcattacactgaaaatgttggcattttcttttctctgattgtaatgtctgccttctgcttgttattctgattagcatgtttcattgtagaaggtagctaatatattttgtttggtggaagaagaattgtaaacacgtggatagtatttgtattgggtaactgccggtaatgtcaggtgagccaatcataaatgttggaaaatatagactctgttacctttcaagacttcatattaaaacattgtccctctcttacttcatcttacagcaacgtttacttagatatggaatccatttcaaataacctgtggaaatacaaccgctatcgctacatcatgacctaccacgagaagccctggctgcccccacctctcatcctgctgagccacgtgggccttctcctccgccgcctgtgctgtcatcgagctcctcacgaccaagaagagggtgacgttggattaagtaagttgttctatgtgaggcaggagaaagagagcaaaaagtaggattcaaggcaaagatgcactggagtattataaattaagttcagggcactgtggggctctgggagttccctgacaatagaatatcagctgatgctctgggtctgagtaaatatattgacctcattatgaggtcgcagtgccttttgccaagatgaacggatacttagaaagggataggtaggaagagaatctctgcttgattgtgtaaaggctttatgtcacatggaaaacttgtgttttctctgctgaccggagaactcatcagaataactcctagagagtggtcatgtgacgtgtactgttctccttgttgtggaagatggaattcagacagaatggagttacagaaggccttggggtctaagagaaaagataagcaaagctgggctttaaccagagtcacgatcctctggttctctaatctactgagcatggaggtgattctgaaatggatgtttcttattttcaagaacctcaactcagaaactgggtgcggtagtgcatgcctgtagtcctagctactcaggaggttgaggcacaagaattgcttgagctcagaagtttaaagctggggtgcaccatgatcatgcctgtgaatagccacttcggcctgggcaacactgtgagtcaggatgcggaaataggggttctcacttgtgttttttcataagcttatatattttgaggttttcctaattcatcttgtttagccagatcttcactgcatgatatgactatcgtactaattgttgtcagagaacattgcgtttggtggttttattctgtagttcctgtcaagcagttccacaattggtaccaggcccatttctagatagttcccagaaatacaggaagcagggggcataaatgcgcaatcctcttcccaattcctaaatctaaaatacctctgaaaactgaaatccttttttcttcacaaattggggaaagactcatttggccaaaaaaggctgatgagaattgatgcgaagccatttattctctttatttcttgtagtatgaatattcattgatgttggctgcagaaaatagcaatatgtttgattttagggattgctttaatcttaactagggatttcacttcatttatgacatactcactatattaattttctgaaactagaaaaaaacagttctgaattctaaaatactctggactccaggagtttcagctaaggggatagcgggctatttatgtgtttaggtaggtccttagggggacaggtcatcccctgcagtatattatggggttgacagggtgatatgcttttgctggtggtaggtgactctgtgaagtattttttctcctcctaagtcactttgaagatttttttttctttttcataccctgctccctgaccaagagattcagcctttgtacgaaagccaaagcatacctgaagttaacttgaaggcttataattatactgtaaatttcaggccgctaatagagagacgtcccaggctttggctgcagaaccattgcaacctaatagcagaatgtgaatcacttgataaatcctggaattgactaggatttgcccagacttcctagtaccacatgaaagaacgtttcctgggttcaccttggtctgtgcttataggatgattcatataaaactcaagtaaagtttaaaatgaattcaccctgagctttgtggaacattgttgaattttcataacattgcttctgatcctttatattgaggataaagacatttacacaaggggcagcagtgccaccttgcggacaattacaggaaagcgccacatactgcaagctgcgcctgtcattggaattactctggattgtttgctctcagggatccacataaggttcacatcatgacacctgtaaagtttcttgctcataggagattctttagtgaaagaagacattagagttgggtagggggtgggagataccgaatcttttcagtgtctgaaaatttttttcctgccatttaaatcagaaagcactgtatacctgagttgtgaatacattttacagctgaataatacttttagccatgttttcaatttaaaattcagattttttgtcattaattttaacagaaaataatgtaacaattgcattttaaataaattctggagaattgtattagttctttttctcctaatgtaagcaaaaccattcaagaaagagaactttccaatttaatccttttagcagcatcacttcattatatattttctaagtattataaacttgcttaaaagatggtatattattctattaggcaacagtgaaagccaaggtaatagaccaaatgtgaatgctggagtttgatgaagaattgtgttagccttataatatcacttagtgatgtgtctttttaatgagttatttataattgtgtcagagaaggtatacagctgtgattggccattgaatggtaataataacatctcattcttcagtagaaggatttagtatgcacaaactctgcgtaacaaggtgaaactttcttatacttactggattaatttcaatagactgccttcttctaatcttgcatttaacctattggttatttactgtcattgtaatagctaaaagagttggaagacaggttgattaatgagcacaaatatacactttgatagaagaaataagacctagtgttcaatagattggtagggtttttgttgttgttgttgttgttgttgtttgagatggagtctcgctctgttgcccaggctggagtgcagtggagcgatctcggctcactgtagcctctgcctcctgggttcaaatgtttctcccacctcagcctcctgagtagctgggattacaggcatggaccaccacacccagctaattttttttgtttgtttgttttaaggagctgagagtttaataggcaaataagaaggaagaagctccccggtacagagatagagggaggggggctccaaagccgagagaggaaacccccaatttttgtatttttactagaggtggggtttcaccatgttggccaggctggtcttgaactcctgatctcaagtgatccacctgcctcggcctcccaaagtgctgggattacaggtgtgagccaccatgccctgccatcagtaggttgactacagttaaaattaattgattatacatttcaaaatagctagaagagaataattcaaatgtttctatcttaaaggacaggtaaatatttaaggagatctgcctcagcctcctgagtagctgtgactacaggcttgtgccaccaattgccctgatgtgattatatgaatgtatcaaattatcacatgtatctcaaaaataggtacatctaatatgaatcaattaaaatttaattaattttagaaagtgttggcagagagaaaagaagacagattccccattttcatataaacgcagtgaatttttcttaaatgtgaaagcattctaacctgtgaaaatattgaagagaaagaattctatatatgagtcattttcaaagaatgagtaggagagacccaggctggtgtttccagttctttcttttcttttccttttttgagacagggtctcgctttttagcccatgctggagtgtagtggcgtgatcacagctcctgcagccttgacctcccaggctcaagccatccttctgcctcagtttcctgtgtagctgggaccacaggcgcctagctaatattgaaatttttttgtagagagagggtctgcctgtgttgcccaggctggtttctaattcctgagctcaagcgatccacccctgctcagcctccaaaagtgttgggattacaagcgtgaaccactgcgcccagctcccagttgtttattggtgctgtttctgcattaatattagaaatagtttgacaaggtgacaaacttatcacaacaggctatagtttctcattttcaatacaagtggaagaaaagccactcatgccctgaggtgaataatgattctttctgtgtttcatacttatttctatagaactctacctcagtaaggaggatctgaaaaaacttcatgattttgaggagcagtgcgtggaaaaatacttccatgagaagatggaagatgtgaattgtagttgtgaggaacgaatccgagtgacatcagaaaggtaaaagatataaatcttttccattctgaaaccactaacacaacgtgattctgctagaatatctaaaggtgtagaaagatctttcaaatcccagaggtttgagttctttataatttgaaacatttaacaacatataatattcatgtaatcaaagtatatttattaagcatctactatattccaggcactcttttagttactaggaataagtggttaataagacataagaatccttgtcctcatgggacttacattcatgcgcgcgcgcgtgtgtgtgtgtgcgcatgtgtgtaggtggtgagagaaatgaagtggatggagaacaaaacctaagtaaggaaccacaaaaatagatttgtaatttattatcaggcagtaaaagagctatgaagaaaaataaagtagctggagagaacaggaaatgatggtggcgtgaaatctagcggagctgggggttgagtggactgtttagatggtctggttctagaaggtcgctctgagggcattgagtggaggcctgaaagaagtgaggcagtgggcgaggcaggggcgtctggtggaatagcgcccctggcggaaggaacagcaagcgcagccgcctgaggccacatggtgtgtctggcagcagccagaggggaggaggaggtagatggagggtgctggttggatggggagtggggttctcagggcgtctgaccggcggttgttgtgcagtggagttggcggctgcttcactgaagtgggtgaagacagaataggagaagcagagactgcaattacaggtggcttttgggagaagtattacggtgcagggaagcttggtatggggacacggtaaggtttttttgttggattttgcgtaatgtggcaataaataaaacagcatggtcctgaaaatgatccaccagcaagggagaaactcaggagtggagggaggaggccatttgctgaagagaagtccctaagaagctgggaaaatggagggtctggctttttgcccgaagcaggggaacgggacaggatatggccagagtagacgggaaggcagacaaggttggtggggacccaggtctcgaggcagagtcgtcggctgggtgtgcctatgtgtgggattttgagggaggcaggcggtatgggggacattcagaagtttgaggaaagaggaggagacacactggagagactgaacatattaggaagctataatgtgatctgagttactgttggatttattactaattgtgggtgcatggcatcgtgtgaaaatatggaaggctatatgtgatgaaatgcatttttttaaaacagaattgttcttgtaaatggaagcaaattgacagaagttaaatgtgttcctctatttttgaacatatatggaactgactatgatgtattatatctaattatgcatgtttttttctgatgtcaaatatcaggtagagagatgtgaatccttaaatatggctttacttaaactgaatcacatgaagaactttctaaatggttcactatgggcataagtcatgtttatataaatctggacttctctattggtaccatatttatataaatctgtgtttctgtgcctgattgaatttcagattaaatttaatatggagaaaaaattgaatatcaaagattgagtccacaaaaattgatttcacctacataatatctttagtccatagttatatgaatttctctttccttcttctacacgttctgcgcccctttatagctatgctcattgagtccgacgggcaagcttggttctccgttttgtatgaagcatagactcgtattaggagcttacggagctgggatgaagtcctgctttaggcacttactagttatatggacacaggcaaatttactgaacctccttggtttccttcctccctccctcccttccttccgtccttccttccttccttccttcctttatttcaacggagtctcactctgtcaccaggctggagtgccacggcgtgatcttggctcactgcaacttctgcctcccgggttcaagcaattctcctgcctcagcctcccgagtagctgggattacaggtgtgtgccaccacacccggctaattttttgtatttttagtagagacggggtttcaccgtgttagccaggatgctctggatctcctgacctcatgatccgcccccctcgacctcccacagtgctggtattacaggcatgagccaccatgccaggctgttttcttatttgtaaaatagacatggaggccgggcaaggtggctcactcctgtaatcccaacacttttagaggctgaggcaagtggatcacttgacatcaggagctcaacactagcctggctaacatggcaaaaccccgtctctactaaaaatacaaagaaaattagctgggagtggtggcacatgcctgtagtcccagctgctcaggatgctgaggcagaagaatcacatgaacccaggaggcagaggttgcagtgagctgaaatcgcaccactgcactccagcctgggcaagagaatgagactgtgtctcaagcaaacaaacaaaccccagaaatagccctgcttcttagagatgctgtgaggattaaatgagataatatagatgaactgtgtggcagagtgctgactcatagtaagagtacaatgaaagttatctattattaagtaaaaatgggcccctcaaaattgttagtataatttctttttaaatacaaattcccctccaacccttaaggaaagggggatgaacagatgagatgtggacaggatagcctccctgcctccccaagattatgaactgggataagtttatggagagccgtttactctaaactataaactaaggaaggattttaggtggacaaagatatggacagatttaccttcagtaatggtgtggatttgagggggtcagaataagaaccacgaagaccatttgagagaatagtgcagtgcactgatgtgtccacagcctcgccaaggttggtggtggtgggattgaaaagaaggggtgaatatgacatttagaaagaacaattcattaggcatgttaaggatcagatgtggagctaagggagagcatagagtccagcacgactttcagaaaagagtggggtaatcaggtgaaaggtggcaccaccgaaataaagaaggcacaggaggtgtgagagaaagcaataagttgtagatttcttgagcttgagattcttgtagtatatttagccagagatgttcaggaggctttggatgtgtgcatctgaagcccccggggagcatttgaactggtggaggagctcatctgcttattgggacagtcaactgtaggagtcatctgcctattgtaggaaactaaaagtatgacagaggaagcgattatgcccaggaagcaagagtgagggaacctagtgagctgagagttaaaacctgggaggtgccaacacctgtaatgggcaaagagaaactcatggagaagaccataaataaccattcagaggagtataaagagaactagaagaaggcggtatcataaactaagggaatatagagtgaaaattgagaagcagacataaacaattcaatgataaaatcctaaaaacattaaccatcataaagcattgtctttctcttggattcttttcttgggatttgagtagagggttagaaattaaatggatatgtaccgtctgaaaattatgggtacttccaagagatttagaatttggttatgaagctctaatttattattattattatttagatagagtgatcagagctcatgcacccttgaaatcctgggctcaagcgatcctcttgcctcagccttacaagtagctaggactacaggcacatgctaccatgctgagctaacttttaattttttcatttttatagaggcagggtcttgctaatgttgcccaggctggtcttgaactcctggcctcaagcaccccttctgcctcagtctcccaaagtgctgggattacaggcgtgagttaccgcatctgagcctgcagctctaattaaacttcaaaatagaatctattttccctcttgatggagctatctcagtggcactgttcttatactgtcatctttgttgaggtcatttatatggacctcataaatgaggtatgggaaagaggggagaatatttcctgaggtaactgagcaatagtttgaagagggaagggaaaaagattcagaggattttgcacattagcctacttctgaagaagagattgctatatccttctcgaatcaagtgagttgcgacagtggaaaaagagaacatagcaaggctgttttaaatcttactttccctatttgggactctaacttcttttttgattctagtagtgtaagtcagcttttccctttctctgttctgtggagtaagatgcttttaggtgtttttccacattaagcatgtttggtacattatatttcggaaatgctgtggttttaaaaaatatttaacataatgtgcattgtaattcatcagtacagttatagcttaagcaggtcccaccactatttgaccatgaaaccttactgaggaacatctgtgacacctcccagcatgagaattgttgttcatttagtacttcatggtactctaggaaaccccaaaagaaattgcctggatcctaggtgagttgctgagaggtaccagaaggcagtggtcaatgccactgaatatggagtcggcctgtctaggtttgatgcctgacattttcatgggccatgtgactctggctatgtgacctaacctctctttttttttgagacggagtttcgctcttgttgcctaggctggagtgcaatggcatgatctcagctcactgcaacctctgctccctgggttcaggtgattctcctacctcaccctccccagtagctgggattacaggtgcctgccaccacgcccggctatttttttttttttagtagagatggggtttcaccatatcggccctgctggtcttgaactcctgaccttagatgatccacctgcctcagtctcccaaagtgctgggattacaggcatgagccactgtgcccggctgacccaggctcttttctatgaaaggataatagtaattcctaccttatagggttgttacatggattaaataaaacagtacaggtagaacctttataaaatgcttggcacatagtgagcactcagtgaatatggtgattttcatgatgattgtaattatacttgccgttatctcattttaaggcatcttgcctaaaggcccataataaaacaattaccattctcatctttcttccatcctcgtaccttgcatggaggaaactaaaattataaattttatgtgtcagaatgactgaaaggctaaattaatgtcgttggtggtccagcaatataattaaaatatgtttcacgggacatcaagttttagaaaataagtctataaaagcaagggacctgatttgagggtgaccacgttgtttgtctaacaggtttctattgtagcatgttacctgtggctgtgaatagttgctggtttctattgtatccattcgatgtgactgctgctaatggaacttaatgagtctccattactggtgttcagactgtactgtttttgaattagatgaaacagttcactggttggagaggctctaattaagcatatttggaagagagtatacatatattttgtgctgtttcccacatcatccttgccagttctaattttgcagattccagaaggtcaggaagcatttgttaagcctctattgagttatagaagttgaattctatagcagaagcaagaaagagagggttctactcacatagaatataataaaaatggaaggtgccactctttttatctttaatttctatttacaaaggtcccagaaagaggaagtggaagatctttctttcaatccctgtgacttgagatgtgttctaaacctgatgggaagtctaacactattttgggaagtgcttgttacagctgagtgttaaactcttcatggcataatcacgacttctccctgcccccagataagagcgggaatcatttttcatttctgcaatggtcacgtcagccatgacacaattggttaggttccttcccatgctgtttctttattttaatcttgtttattgaagattttcattattgagaaactgaaactatacctcctctcccccaaataatagaatgaaacaagggaagaaaagaaagaaaaaacaatgtgatatgccagagttcactgtgaaaattttggctttttaaaatttagtcttccacatatttccagttaaaatgatactattttgtatcctgttttttttttttttgctcttaacacatcaaaaatattttctccaattaattacatatactttgtaaatatattttaactattgtttctgaacttaaaattttataccaaatttgaaaacataatgccgaacataatagacatccccagccctgcctctaccactagaaatagcccaagaaaataattatcaacaatgtatgatttttaatggatgcataatattctatctcacaatataacaaacatatctgtctgctttagcatagtaagattatgtttcctttataatattgtgtccctatgttccatccttgctaccactgagttgtttcactttttctttttttaatttgctaggttaaaacaaatgctgttatgatatagatgaactcattattatcttaattttcatctctgattacataatgaggttgactattttactgggtttccttaccttttgtattgtatcctttcatctgttcatgtccttgggagtctttgtaattttttttcctcaataaattgtgaaagtttttgcttaatcaagagatatcaatgcctcatcaaatttattagaacacagttttccaatttatttttgttttaagcctttgtattctatttttgcgtacaagtttctttttatgtaatcaactcatacatgttgtaatttattccatcactcatgaagtttagatagctgcattagtttcccaggctgctgcagcaaaataccaaaaactatgtgtcttctaacagaactttattgtctcagacttctggaagctagaagtccaaaatcaaggtgttggcagggccgtgctttctccgatgttgctatccttccttgcctcttctagcttctggtgtttgctggcaaccgtggatgttccttggcttgtagatgcatcattctagtcaatggccattttgtccctgtgtgtcttcatatcgtcttccctctgtgtgtgtgtatcaggatttcacattataaggacaccagtcatattggattaggattcagcctgatgatcacattttaacttgattactctatcaatatctgatttccaaatcaggtcacattctatggttctggggttaaggcttcaacatatcctttttgggggatacaaaaccaacctcatccacatacagagataattacaaagaaatgtacagacaaatagtagccatctctcaattaaattaatttttactttttttttttttttttgagatggagtcttactctgtcgcccaggctggagtgcagtggcgtgatcttggctcactgcaacctccgcgtcagtctcctgagtagcagggattacaggtgcctgccaccatgcccagctaatttttgtattttttagtagagatgggatttcaccatgttggccaggttggtcacaaactcttgacttcaagtgatccacctgcctcccacagtgctgggattacaggcctgagccattgcacttggactaattgttacatttaattcaatttacttgcaacttacatttacatttgaaaggtgaacatgtgttgtgttgcttttacatgaatcaatgactgaacatcataatcttgggttaaagtattcaaaacaactttaaaaatttgcattaggctttttctgaatataagtcttctaaaatggattttgtttgaaacttgggaagcctgtttgaacagtagagttagagattttttttttaattttaaagatctgtgttttttttctttttcttaattacatatttgattattgattctgtttctgtcattcttatttcttcctcaggatctcctacatgcattaaaattgtacggtgcttgctgttaggaagtattcaagtgtttgtcatgtaaatgaataaatatattaatgagtaaaaatgggatgattgatcacacaattgaaggaatcattagctggaactggaaatgtggttctgaaatattaaaaagaaataagggctggaaatgtagatatgtaagtttttcctctcctatgggtagtagtgggcattataggagtggatgagatcacctgagttgagagttatgtattgggcgaagaagaaggcaaaagacagacttaacctagggaagcagctgaggctcaggagccatttaaggatggaagtagggtaggaagagagcaaattcccactggcttaatgtgcttgttggttttctcccttccttcaccactagggttacagagatgtacttccagctgaaagaaatgaatgaaaaggtgtcttttataaaggactccttactgtctttggacagccaggtgggacacctgcaggatctctctgccctgactgtggataccctgaaagtcctttctgctgttgacactttgcaagaggatgaggctctcctggccaagagaaagcattctacttgcaaaaaacttccccacagctggagcaatgtcatctgtgcagaggttctaggcagcatggagatcgctggagagaagaaataccagtattatagcatgccctcttctttgctgaggagcctggctggaggccggcatcccccaagagtgcagaggggggcacttcttgagattacaaacagtaaaagagaggctacaaatgtaagaaatgaccaggaaaggcaagaaacacaaagtagtatagtggtttctggggtgtctcctaacaggcaagcacactcaaagtatggccagtttcttctggtcccctctaatctaaagcgagttcctttttcagcagaaactgtcttgcctctgtccagaccctctgtgccagatgtgctggcaactgaacaggacatccagactgaggttcttgttcatctgactgggcagaccccagttgtctctgactgggcatcagtggatgaacccaaggaaaagcacgagcctattgctcacttactggatggacaagacaaggcagagcaagtgctacccactttgagttgcacacctgaacccatgacaatgagctcccctctttcccaagccaagatcatgcaaactggaggtggatatgtaaactgggcattttcagaaggtgatgaaactggtgtgtttagcatcaagaaaaagtggcaaacctgcttgccctccacttgtgacagtgattcctctcggagtgaacagcaccagaagcaggcccaggacagctccctatctgataactcaacaagatcggcccagagtagtgaatgctcagaggtgggaccatggcttcagccaaacacatccttttggatcaatcctctccgcagatacaggcccttcgctaggagtcatagttttagattccataaggaggagaaattgatgaagatctgtaagattaaaagtaaggaataaacatttaaaatatcagcattaagtcctttgcattgctactggttttgttttgttttgttttttaaatctgtgactcttaaccacattgtcattctccccattctctcagctttttctgtaaaacaaaatgttccccacttactgttgtcaactttctcatgtagaccatttccttgcagatctttcaggctcttcagaaatagggcagggagcatgggtcaaagcgaaaatgctaaccaaagacaggagactgtcaaagaaaaagaagaatactcaaggactccaggtgccagtaagtgtactgttattctgtcttttaggttttgagcagtcaaggtagtggcctatcttagtttgatttatctttactgtaaagtgccatctacacaaaataacattgtgttgaaaggattgaagatataatttgttcctctttttaagagatgggtggggtcttgctatgttgtccaggctgaccttgaacctctgggcacatgtagtcctaccacctcagcctcccaagtagctgggactacaggcatacacaaccacacccagatataaatttaagagtcattagagtggatatactgcaatttacttatctgctaacatgttgaaggacatttgggttgttttcaatttttggctattccaaaaaagctgttatgaacatttgtgtacaagtctttttgtggacatatgttttaatttctccttggtaaatacttaggaacggaatgtcagagtcatatggtaagtgttttttaatttttcaagaaacttccaaactgctttccaaggtaatcgtaacattttacatgcccaccagtaatttatgagcatttcagctgttctacatcctcactgtcttagtttgttttgtgttgctataatagaaatctaagactgggtgattaataaagaaaagaagtttatttcttacagttctggaggctgggaagtccagggtggagggaacatatctggtagggacttcttgctggtagagactctctgcaaaatcctaggtggcacagggcatcacatggcaagggaggctcctgagagagccaaacaggctttcataacagatccactctcatgataaataacctatcccctccataatccattagtccattaactcatgaacgaattaatgtattcatgagccagagccctcatgatccagtcacctcttaaagtctccatctcttaatatgattacactgggaattaagttttaacatgagttttggaaggaacaaacgttcaaatcatagcactcgccaattcagtatactcaatcttttaaattttagccatattaatgaatgtgtagtggtatctcatggtacaatttcatttgtatttccatagtgactaatgctactaggcatcttttcatatgtttatttgccctctgtacagtcatgcattgcttaatgatggggatactttctgagaaatgtgtcattaggtgatttcatcatggcacaaacatcatggaatgtacttacacaaacctagatggtctaacctaccacatgcctagtctgtatgatgtagcctgttgctcctaggctataaacttgtacagcatgttactgtactgaacactttaggtaattgtaacacaatggtatttgtgtatctaagcatatctaaacatagaaagggtcagtaaaagtacagtataaaagataaaaattggtacacctatatagggcacttacttgcaggacttggaagttgttctaggagtgtcagtgagtgagcggtgagtgaatgcaaaggcctagagcattactgtatactactgtagactttataaacactgtacatttaggctacactaaatttataaaaaacaaaatgtgctacgatgttatcacagctgtaatgtcactaggtgacaggcatttttcagttgcattataatcttatgggaccaccgttgtattagtggtctgtcattgactgaaatattgttatgcggggcatgacggtatttttggtgacatgtttgttcagatctttgcccatttaaaaaattgggttgttgtcttattataaagttgtgagcattttaaaatatatgttagatataaatccttttttgagtagatgtttttgcaaatattttgtctcagtggtttgccttttaattttcgtaaacgtcctttgaaaccataatttttttgatgaagtgtttgattcttttcttttatagtctatgattttttgtatcacatttaaaatatttttgccaagatcactaagacttattctcatgttttcttctaggaattttatagttttagctcttgcttgtaggtctataatccattttgaggtaatttttgtatatgaagatagctaagaattgagtttcttctgcccttctctttctttcttgaatatgaatatcaaaattttctaccattttttggtaaaaagatatctttttcaattctgttcttgaccatattaacaataatagaagatatcttttttctgttgttgccttgacatctttgtcaaaaattaattgaccatatagatcacaatatgtatggatcaatttctatctctatgccaatattatgttatcttgaatacaactttataataaattttgagtcatatattaaaggtcaatttttctttctttttcaaaagtttggctattttgtgttctttgcatttccatataaatttagaatcagcttgtcaatttttatagagaagtggactgggattatgaatagaattgccatagatctatatgtcgatgtggggaaagttgacatcttaacaataatgagtcttctgattcacgaacatgatgtatttctccatttaggtcttctttgacttcttgaagtaatgttttatagcttttagactactgatcttgcacatattttgttaaatgcatccctatttcatatttttgaattttattataactgccattagttaacaattttaatatctgattatttgtttatggtatatagaaattttttaatactggtcctatattttgcaaccttgctaaacttctttacttgagtagatattgtgtagctttttaagaattttctgtatacatgaccatgtcatctacaaacatagatagttttacttcttcctttcaatctggacatgttgtatttccttttcttgcctgattacactgaacagaacctctggtataatattgactagaagtgataaaagcagatatcttttcctgtgtctgttcttaggggaaaagcatttaatcctttaccattaagaatgaggttagctataggtttttctatagatgccccttatcagggtgaaaactttccttctgtttttagttttcagagaatttttatcattcatggatattagcctttgtcaaatgctttttctgtatctacttaggtgatcagatatttctccttttgattttgttattttacagtgaatttcattcattaattttataatgttagaattcttagaatattaaattaccttactgggataaaccccacttggtcatgatgtattttttttcatattgtattcattttgctaaacttttcattagtttttttgcatcagaattattgagggatagttgtctttagttcacttttattgtaatatctttgtctggttttggtatcaggatgatgcttggtttatttagtgagttgggaagtattccctcctcttcagttttctgggtgaatttgtaaggaattgatattatttcagtctgaagtattcgtagaattaaccaatgaaaccatctttgtgggaaagcttttaactacaaattcaatttctgtaatagatatagagctatttaggttatgtaattcttcttgaatgagctttttttgtgtatgtcaaagaatttattcattttgtttaagttgtttaatttattggcataatgttcataatcttctcttattattcatttattgtctttgagatctgtggttagtgacatcacttcttttgttcctaacattttattttatttattcatttatttatttttgagatggagtattgctctgtcgcctaggctggagtgcagtggcttgatcttggatcactgcaacctctgcctcccaggttcaagcgattctcccacctcagcctcccaagtagctgggattacaggtgcccaccaccatgcctggctaatttttgtatttttaatagagatggagtttgaccatgttgaccaggctgatctcgaactcctgacctcaggtgacccacccgcctcggtttcccgagtgctgggattacagggatgagccaccatgcccggctggcctgttcctaacattttaaatttgggttttcccctaccctcccctcctttttttttttttttttttgacagggtctctctctgtcacccaggctggagtgcagtggtgcaatctcagctcactgcaaactctacttcccagggtcaagtgattctcctgcctcaggctcctgagtagctaggattacaggcctgtgccaccccgcccagctgatttttgtatttttagtagagacaggttttcgacatgttggccaggctggcctcaattgatccgcctgcctcagcctcccaaagtgctgggattacaggcataagccaccatgcccagcctctgatttctgtttcattcatgcttgctcttatctttattatttcttttgttctatttactttgggtttaactctggtcttctctttctaggtttttttttgttagttagtttgtttttttagacaaagtctttctctgtcgtgtaggctggagtgcagtggcaccatgttggctcactgcatcctccgcctcccgggttcaagtgattctcctgcctcagcctcccaagtagctgggactataggcatacactaccacacccagctaacttttgtattttcagttttggccaggctagtcttgaactcctgacctcaggtgatctgcccacctcacctcccaaagtactgagattacagatgtgaaccaccacgcccagcctctagtttgttaaggtagaaactttggtcattgatttcagacttccttcttaatttttttttttcttttgagacagggtttcactctgtcacccaggctggagtgcagttgtcatctcagcttattgcaacctctgtctcccagtctcaagtgatcctcccacctcagccccttgagtacctgggaccacaggtgtgccaccacacctggctatttttttttttttttttttttgtagagacggggtttcttcatgttgtccaggctggttcttaaactcctaagctcaagctattcacctgcctcagcctcccaaaagtgctggaattacaagtgtgaaccactgtgcctggccttcttttctaatgtagtcatttagtgctatcaaattccctctaaccactgttttagctctttcctacaaattttgatgtgttgtttttattttcattcagtgagtctttttatatttcgtttggaagttttagatctcaagtagcaattctgtaagaattcacctttcatgatcttaatgctctgccttatttaaaaaatgtttacacttatttttccaaataataatctggatgcattaaaaaaatacctcagccttttttagaatgagaagcagaagcaaagagattagtattgagacaattacataaaagaaccttttaggggagagataagaaaggctgttctttcaggaaaaatgccatgagtttctggaatcccaagaaatatgcacttaagtagatttatttttggaatagttcaaatgtccagagttcaactagaaattgcaactgagttcaataattcaagcttggatttatttatttattgcttttgagttaccaatttaccgcatttgttctgcagctcggaagtatataggacggtcatattattggctatctattattttagtaatgaaggaaaaggggctcagagacattaagtgattttcccaaattcacatggcttctaaatgacagggctagaattccaacacaaattctttggattctaatattttctcaaaatatgatctcctattggcagcatgagcatcacctgggaacttaatagagattcaaattcttcctccttccagacctgctgcattagagattccagaggtgggacccagtgacctgtggcttaaaccagcccccaagcccttggtgattctgatgtgcactcaagattaagaaccaaggtgtggagcaggggttctcagtcatgactgcaaagagaaatcacatggatgcttgtgtcctgccagcctaagtgatgggatttgtcagcacttcccaggcaattgtcatatgcagccagtgttaacagacactgcccttcaccatggtgcttctgttagtgtgactcacagtgcttttgaattaatgtcactgtgttccaacaagtgtctttctctccagatcataacagtcaatgcctgctctcagagtgaccagttgaatccagagccaggagaaaacagcatctctgaagaggagtacagcaagaactggttcacagtgtccaaatttagtcacacaggtatgtaacatctacaattttggatcccaaaaaccctggtggggttttctcagggtacggtctttagaccattggcggttcctcctgttctttcacatggagatgagggaaagagaagatggctacactctgtaaggaaaatagcatttttctgtttttcatttttatgaaagggacaaaattttgtttgtctaaaggactccagaaaagaaaaattaagatttagatagtctcttgtattcaaagctgttgaacctgactcagagtgttttatcgagacagcattcatttagtctgatttatggataggggattgtctaattttataaattcttaaagtacacatgacactgatatggactgctacacagaattcagtgggttaagttatatttggttatttactactgtctacatttagtgtttattctgtgggcaattatctcttaataagcttaataatggtgtttgtagaggagagaagatggatcaaccagctaggaatgaatactatgggctaggcctggacggtgaaataggtctggacaggtaagatgagggcagattgtgaacagaaaagatagcaatgataggaactttggacttcttgcattagataagagacatttaccaatttttaaacagaaaggactaagtgattaagtagtcataaggttttaaaaatatttaaaatactaagtttaaggtacaggtagacattgtattgaaatttaggctgtcagacttttctaaaaatctgcttgttcatatggtaaatggttctcaaccaaggggtgattttacacgttcccttcactttccccgtgggacacttgggaatatctggagatatttttgttgtcataactaaagtggggggaatgctcttgccacctagtgagtagaggccagggatgctgttaaacatcttacaatgaacgggatagataggtcctcatgacaattatccagcccaaaatgtcattgctaaggtggagaaaccctgattttatgtttaaaaatactcagttgtctgttaaatcactgagaatcaagtggtctctaagctgaaagagacatttagagattaaattagtcagcaccccctcaatttatagatatagcgtgagagcttaatttaccttgactttaatcataccatttactagagaccataaatttggataaattaaatcccacacctaaagacatgactccaggaccaattataaatagattgattttatttataagtgtcatatatttatattatatatattaggtattatattttttataaatagtataatttatgtttaggatgttatatatcattcttaaatcatttaagttctttccaacgaatttcaaacatcgagagatacaagtggcaggaggtttctgggaaagaatctcattaagtcagatgatcagagggagaggtaaagctagggaaataggttgatccgagtgcccggctaatctgagtgagtaatgaggcccactgtctttcttgaaccacatccagagttgagaagcttgtttttttgaaacgtgtctgagttaataattaattgaaaaagaattaaaaaaataaaagtctgtgaataggcagatgccctgtcaggtagcattctctctctctgtttttattttaaagacagggtctggctccatcacccaagctggagtatagttacgtgatcacagctcactgcagccttgacctcctgggctcaagcgatccttccacctcagcctcccgagtagctgggactatagcatgtgccaccatgcttggctaattttgtttatttttgtagagatgggggtctcactatgttacccaggctggtctcaaactcctgtcctcaagtgatgctcctgtcttggcctcctaaagtgctaggattacaggcatgagccggctactccacttggccttcaaatagtattttttatacttcttgtatacttttttttttccagcacaaaatcattaggaaaaatgcaaccgttatctcctatttttagtcaggactcctaataagtattattctcagaattaatccaaccaagtattcactaaatatttattatgcatctactatatgtagtaactctgtaggtaccagctacaaaaagaataacagtaatgaacctcatcatcctttttaataaaaggctaaaaattaaatctatttatttgatggcattcctttctttttttttttttttttttgagacagtctcactctgtcgctcaggctggagtgcagtggcacagtcttggctcactgcaacctccgccttcggggttcaagcgattctcttgcctcagcctcctgagtagctggaattacaggtatgcaccaccacacctggttcatttttatatttttagtagagacagggtttctccatgttggtcaggctggttttgaactcctgacctcgggtgatccacccgccttggcctcccaaagtgttgggattacaggtgtgagccacggcgcctggcctctattattcttttattgttctttttaagtagcctactatgatgtttgatgcagttgctaaggaaggattcctaactagactaggaatggaattaaatttcacatattttaaataaagcatgtgcaatagtgtgcaggataaggtagatataaaaattgctaaaggtgttgtcctataagaggacagtttatggatcatttaattcttgacttcaatagagaagtgtaagttgttataaatgtgaaagtaactatagaagaatagaaatagaatatatagttttcaacctcttgagaaaaaaaggataaaggaaacttggtaaaacttgctaaaaacagaaagggaaaactatatccaagtttaaatgaatgtactgtgttcagatttttctatttgggaactgtgatttgaatgtaacacattttcatgtattttctaatctttctcttcctctttacaaggtgtagaaccttacatacatcagaaaatgaaaactaaagaaattggacaatgtgctatacaaatcagtgattacctaaagcagtctcaagaggtaaaaatattttaggagttaaaaaaaaaagcattcgagcatgcagtgctactcttgactacgcccattttacctttatgtcccttaattggcttctactttttattgacagtctgcttaatctttgttttgaagctatgctcagttgaatttctgttctattttttcaatcccctccacattattctttctttgacatttttctttatgcaatttacctatccactcaataatttatcctggggatgttcagcatgagagagaaagaattcaggagttttcgaaactgttttcaaatatatgaaagttgtcatgtggaagaaaaataagctattttctatacacttttaagaggtagatctagaatcaacatatagaagctactgggagacagatttcagcccaatctgagaagaaatttttagcaattggagctttccaagcatggaatgatttatttctggaagtagtgagtccctcactagtgcgatcagtcaagcataggctgaacaaacctctttgcaggcatgatggaggggattcaagccttgcagggtaaagacccttagtgtttcttcaatgctgagattctccggttttgcagtctgtttttcttgctgtctaaaaatatgggccttgttttgtgccatccgccacgtgggaagtgtgaatagttagcttaacccaagaaacctaattttaagtctttgtttgaatattacctgtttgaacttgagaactgttgagacatgacctttatggctaacaacctcagatattcttgtaggaatagcatctgtgaaagattttcaaagtaaagtgtcagactacttgagggtaattggaagcagggacctgtgttcaaattctggctctgccactttctacgtttcaaagctatgtacatcagttaacctatgagcttcattacctgtatctctaaagtgggactaatgccatccttataagattattgctaatggacagcaaaaataacaactatgaaaaggcctacctagagtaatgcctggagtatactaagtctcaggaaataattgaatttgagtaggaaatcaaatgaggtaaatccaaggtaatgttattttaaataatcatcatgacctgagatgagaatcttttcataagacataacaatgtgatgatccgtgttgtctgtcaacttgtactttcatttttctccatgtcattagctgattgtgtatgttcagtcctgattaactgattgtgtatgtttagtcctgattttctatgttcagtctgtaaaaaatttcatatattacattttctgtttgatatctccttaaaggtaatttcattctgttaaagtccatcaacacactgagtaactctgacattgctctaacattatgcatctttctagcttgggtttagtatgttttttaaaagaagaatattcaggtagatgaagaaaaaagaaggattctccaaggagcgtgtttggcagatcattcctagaaacttggggtgggactatgttgagcacacacgtaacggcctttcccttctgctcaggatctcagcaaaaactctttgtggaattccaggagcaccaacctcaataggaactccctgtgagtatttctaaatgtttatgtttaagaatctttggcttccatttttttaacttggttaggagcaaaggtttaatttagtcagaaagggagagaaaagaagtgtgtgtcaaatgacaatacttttctcttgttagcagaatgaaaatgatttcttctccaagttttcctgtttctggcaacaagatctcacctgagttccttttaagaatataacgaaacacatactcctacaacaaattaaacatttgccttttcagtgtcaaaacacacatagaataatgattatcatatctttttggatagataagattgtgaatttgcataaaagagtagaaatcagtctgtcttgcttaaagaaacagacttagactgaacacctgattacgtttattctttaattttaaaaataattattttttccttttagtttataaggcatatcttttttgtttttggtttctcagtagcatgctaatcatcaaagcaataactctgagaaagattgagacagagagggagaggaagactggttggagagagaaagaagatagagaactcacttgagtgtcttcctggaattttattagtatatatctagagaaataaaagttgtaaatcaaccaagcaaagataattctattttatttgtagtattttctggactttcctagttgcatcatcacattaactattcatacaggtagaattcaaaaccatctactctatggaagtgccagttgatacccagcaggtagaaggtgactttcagtttgcagtcagctctgtttagagatggtctttctctagggctcccatcatggaccctgtgcaagcctgcctccagacttaaaggacacatgactttcttctcccaaaggttcagtagtttgtgctcatgcagagtaggggtttattgcagcatgaaattgaacaataatcgtaattgtactttctttcttaaggaccttaaatgctgaagatattatttgaatgtatttattcagactcgcctgtggccacttgtgcatttgagcagggcaagtaacagtttaaagagaactaatttcagcctgtgaacatttagcagccacgtgggctaatgaaactgatttgtaggcttgtccagagacattcacagactcatttgtaggcatctgctttgcatagttcaggaatcctttagtttaattgatccagaagaacacaaacacagttacatcttatatatattgtgtgatcacaaagctaattaaaaaacaacaactgcttttcaattagcttaggatgtacacagtaaatgacttacatacatatctggtgctcatttttctataaaaacacttgcagcgctgaaaagttacttctttattgatactatagggattagatgtaactaatacttctctttcaaatatatatacagtcatgcatcaattaacgacaggatacattctgagaaatgtgtcattaggtgatttcatcgttgtgcaaatatcgtagagtgcatttacacacacctagatggtctaacctactacacacctaggctatatggtttagcttattgttcctaagctacaaacctgtacagtatgttactgtactgactactgtaagctatggtatttgtgtaactaaacacaaaaaaagtacagtaaaaatacagtatagaagataaaaaatggtacacctgtataggatgcttacaatgaatggagcttgcaggactggaagcttgctctgggtgtcagagtgagtgagtgctgaaagaatgtgaaggcccaggacattactctacacaagcggagactttatgtgtacacttaggctacactaaatttctataatttttttctttttaaaataaccaattaaccttagctttaccgtaacttttttacttgataaactgtaaaacatttaaaaatctttttgactcttttacaataacacttaaaacacaaatacattgtatggttgtacaaaaatatgttctttctttatatccttattctagaagccattttctgattttaaattatttatttattttcacttcttacactttttaaaaatatgaagacacaaatacacacattagcctagacctacacaggatcaggatcatcaatatcactgtctcctgcctcctcatcttgtcccactggaaggtgttcaggggcaataacacacatggagctgtcacctcctatgataacaatgccttcttctggatacctcctgaatgacctgccagaggctgtttacagttaacttaaaaagaaaacataaatataaggagtacatgctaaaagaatgaaaaagagcataatataataaatacataaacctgtaacatagtcatccatcatgatcatcaagtattatgtgctgtacatagttgtatgtactatatttttatatgactggcagcacagtaggcttacttacaccagcataattacaaacacataagtaatgcattgcgctgtgacattatgatggctaagacatcactaggtgttgggaatttttcagctctgttataatctatgggaccattgtaatatatgctgtctgttgttgaccaaaacatcattaggcagtacatgactgtatatgtatttcacatgtatataaaatatatactttgtgttgttactgttccatgtgctgtttcctttttttgataactgtaagatttaaggcagcattatctaaacaacttcatttttttttcaaacaggctgaaaagttcaattggagttgacagtaagtttttctgtttaaacattttattttttattttttcatctttttaatgcgaggttcactgtcctgctgatatttttgtcattcttgaaattgtatttatgatttttgtccatcatgcaatgtagaaagttcagtagaagagtagaaagttgaatatctttcttcagacaaattgggattgatgtctggtttaaaactttttgaatgactgtttctgactgttatttctccattttctgtgtgaatgagagtataaccactgagctcattttgctcaccaactcttactgtccttttgttttttcacacattactcattaagagccatttataagattgttatatgggtgccttttcctgtagggttttagtaagatctggggccccaaatggctaaataggattaggtcatgtgagacagctccctggtaaagccactataattactctcaaacttgactacaatttacaaactcctttccatattcttgactccttgatgtaaaggcaccttcatcttctgtgttcttgttccatcacactttcttgggtttccagtactcccccacctcctttgcagttgattccttctcctcagcctactaacaaatttaggttgtttctatacaaaggaaacaaatagtctttttcttgatttacctagctttcaagctaccactccaacccttcacctccaaattaattgaaagagcaattaacatttgatctttagcccatggggtgtgccccatcacttttctgaaactccactacaactgctaactcacttgactcttctcagttcttgttgaactcatggcatttgatattggccatttttccttcatggcaccctctcttttctatgtttccttgaggctcttcttctttggctgttctacttctttgtcgacttattttggtctttctgagagcctcttgttccttcgtgcaagctggaaatcttaagtcatttacaatctccttcccaccccattgctcttagctattaaccttgccttctaactccgtccctcccccgccactccccaccccctcatcttcagagtgatctgtttggtctaccctactgctcctgccttaaagccaccattatttattttccaaaacagaagtgtatgctttcgtttgcccttgagtttgtcttagtctgattggtttgtctccttttaaactttcctatgtttctatcagaattatctttatgaatgctaaatcatcactcaggtagaagccttcaatggctccctgttacccaaaggtagactgcaaacccctgagtttttcctcaatgctcttgaaagctggatctcaattcaaatttccaggcccataggcatgatccctttcattcattatttctgccttgcagaatatgactgaccacatagtaacatctccatgtggaggtctaaaaggtgtctcaaacaaaatgttccagcactgtcctctctcatctcaggaaatggcaactctatcctcccagttcctcaggccaaagtcttggaatacttgtcttccattttttcacatccctacatcccatctatcagtaaatctttcaaaatatatcaagactctgataatgttttgccatttccacataacaccattttttttttttttgagatggagtctcactttgtcgcccaggctgcagtgcagtggcgcgatctcagctcactgcaagctctgcctcctgggttcatgccattctcctgcctcagcctcccgagtagctgggactacaggaacccaccacgcccggctaattttttgtatctttagtggagatggggtttcaccgtgttagccaggatggtctcaatcttctgacctcgtgatctgctcgcctcggcctcccaaagttttgggattacaggcgtgggcccccgcgcctggccataataccatttttaagcagttgtaatctcttccttggattatagtatggcctccaaactattgttctctagtagtcttttttccagaaacagccagaataatccttttaaactgaaagttgaactgagtcactcttgctcaaatggcattcctcctcactttgcaaaagcaaagtccaaacagagtctacaatactctgttctgctttccagccacccctcaacctcatttctgtcagtgcatttcactgtggctacactctccttaaacatgacaagcatggacctgccccagggcattcacacttgctgttacttatcactggaatactcttcatttatacatattgctgcccctctcttccttcaactctgtgctcaaatttcaccttatgagagaggctttgcctaaccaccctatataaaacagcaactttcctttccccatgctttctaactctcttaagttgatgcatacacacacacacacacacacacgcacacacacacacactatactatatgcactatatatttattttctatttccttttactagaatggaactagagactttatctgttttgattactgctcttcctcttgagcatagaccagtgcctggcacatagtaggtactcaataaatgtatattgaataaataccaatgtggtctcacagctccttaagcagtgaagccaggactgaaactcagttttatcagactcagatgcccatacactttaagcatttcacactgtttatgaaggccctaccttccaggtggaattaatgtgttccataaacctctgtatatacctttattacgtatattactttaactgtattgtgattatagttacctgtctctctctcctaatacatttgcttttcggtagggtgggaaccacaccttacccatatctctcatgcctagtatgatccatagtgggagaggaatactttttgtttttattgatgacttcagaaagaaacagtcttttctgctgatcttactttttgccaacactccctaaaggaagtgattctcgttcctttccttatccagcaacaaaaacccagagagatctgcgaaattgggctcattatgctgcttactctgcgaggtataaaacagttgccatcatgagaccaaagttctccactttaattttgattttatgaaatagcaaaactgttgcaagggatttctctagagccttgtaatttaggactggagcagacagaagagaatgagttaaacttggaagaggtgttcccaacacatagtccttgtataaccaaacaaatctcttggtgctatattatccaccctcttctttgtttccagtatatagcttttaatgtgttttcagcattttgttgttattttaggtcagtgaagtagtctgttaataacttggtattaatactgtctttctacgggcactgcatcttggtagggagctcagagaatcatgcttctgggatgtcgtgaagtatgatgggcagctgagtgccttctgcaacccagaggtgtaattgattcagaggaaatacatctttgaggctaatattacctgcctttcttcaattccctatataaatatgtttggagatattacattgatgattggaagctgtcaggataccatgcgcaatactgtggttaaaaaatattaggcaagctttttcgaatactgagaagccattctgattaacctgttcaataataactttgaaggcaatatattcataaacatgtatttatctccagccatgtaattaaaatgccaatctcctctctaatttcagagatctcagcctccttaaaaagccctcaagagcctcaccatcattattcaggtaggatgcatatgcacatagacatgtcagctgagctaaatgtctgtgcttctgcatttgtaaacagaaacactgacaaattctgtgttactgacatggctcgcgacttgaaaagttattgttcactttgatgggaagaacattccaatttctaactttgccattgacttgggaaaacaagttttcagaatttaagagaatttgcatttttgcaaaatgtttgcattctcaagttccagattgcaaagtagaaagatgaccttgaaatctaaaaattctttgcacgctcaaagcagccccaagccagagatctcaatgttttggactggggaaaaggcagacctgaaagtagttccttgagggagggttttgtaccctcaatggggcctcagtgagtatgatcactgaatgaaggccaaccccacaaagtgagttcaacaaagatgttattaaacaaagatgtcaagggtcttgactctcttaagcaacatcacttcacagtgcttcagttgtctttctttcaaagtgggaataattgtacttgcccttcctgaggaacagtctgccaaagggctagttgagaattaagaggaaaacactttgaaatgcaaagcaatataaaaaccaactggacttgtgccattggatggtttcttgggagtcattgctctcagcattggatgagataatacatgggcaagccttttacaaatctaaagctcaatacatgagtaagagcttattggtgcgataattactgttataattatataaggttgtttgttcagggtctagtaatagattgccttatcctgaattctcctttgtagtgaatagagttgcagtggattccagactcctcaacccaggctcttacaactgagtctttcagctcggcagtaatctattattttgactccagctgtcaacttaagaaagtctctagtgaggaatactgtaactcatattgactctgatctgttaggctatagctcttaacaggaaaatgcagatcactcgcttctaattaaaatcggtcttcggctctctctggaaaaagaagatgaactgtgcaaagtgaacagtaggtgtccccacagcccaccgtgctttggatttgcttcggaaaggaaaaccaaagtccacggattaaaatgccatttaaaagaaagttccacatatgtatggattagtatgtgatttggtattcaggagagtggaggtgatagtcctacctcagaccatgtgacataatctcatattaaatgcctctaaaattgggatttctttcctgtttaaggcatagtttatttttaagactgtattatagattatatttttgataatggcaaaaataagaggtctttgaaattaaatagcattatatgaatatattgatgtggagaggctttctgtaaattcagccactgatgcatacttaaaatagaaaatctgtttttgtttgcagccattgaaaggaataatttaatgaggctttctcagaccataccatttacaccagtccaactgtttggtgagtagcatttctaccttcttgagtttatgccaggacagaggcataaaatctgagtgaatcaaaggaaaccacattgcattattttagttgaaaattttgttttgttgatagttgtagtttagtgagattcatttcctaaaatggaaattcttgttaactgtcatggccagcattcagggacaaaagctaatactatgggaataagacctataatgagcagcagttgggaagaaagcaataatattgcacctggcattcactgactcaaggctggaagtaagtaggaaagaaaagaacaaaccaaccatttataataagcacaggagaaagcgataaatgtcaatatggtgaaagccaacaggcatctgaagagaaatgctttgtgtattgttttttgtttattttgttttgtgtacactaattgctcttatctcagactgcaaatgtcattttaaaagtctggagtagtaaagaaaaacaatctcaccctggctaaagctatcaaaatttctctgtctggcaggataagacatgagcaagttgacaatatagcaagggtccccaaagtgtccttgatcttgattcttctcacactgttcacatgggggcagaccaggttggcttctgattgtttttatttatttatttttatttttattttttttttgagatggagtttcactctcgttgcccaggctggagtgcaatggcgggatcttggctcactctaacctctgcctcctgggttcaagtgattctcctgcctcagcctctcatgcagctgggattacaggcgtgcaccaccacgcccagctaatttttgtatttttagtagagatggggtttcaccatgttactaaggctggtctcaaactcctaacctcaggtgatctacccgccccagactcccaaagtgctgggattacagaatcaccgcaccggcctggcttctgattgttaatgcagatgccttccccttccatttggccccatggctggctttgcaaatcaatagctctgctctaaagcctctagggatttagaactccaaagagatcttcagtggcatttatctgggcaccaagaataaatatttgaaaggtttgaaaagttgttactgagcattacctagatgtgtttattggtgaggaattagatgcaagagggagagaatggattcctttcttggtaaaccagtaccgtgttcatatatatatatatgcttctatatatatatagaagcaaaggtgtaagggggaaatgaaacaccagctggggctggacagaagttgtatatagattatgttgctctgttaagaaacattaaacactgacttggtagtgtttaggttcaacaggaatttttccctcttcaacagcctaaaagtggaagctatgtagcagttaagtagtattttgtgtctaaaatcctttaagtgggattgagtttgtatctgaggttgtaattcactttagacatgttagcctatttaacctttacaacagcccaatgagaacagtattttcatccccatttttctgatggggaaattgaggctttaagtaactcgtccaaaggcacaagggaaggaaggagaggctctggggtatgacattggtactgtttgactccagctgagttaaaccatgcattttcaatgaagtaatatcacccctagaaaaaaataagtttttttatgatataaagcacagatctacagagtacacataaacagatatacagaatatttttaatacaagttgagcttgtattaaattcaagctgaaatccacctgaaatccaaaatgctccaaaggctgaaactatttgagtgctaatgtgatgccacaagtggaaaactcccacaactgacctcatgtgacaggtcagagtcaagacactgtcaaaactttgttttgtgcacaagattattaaaaatattgtatacaattactatgaggctatatgtataaggtgtatatgaaaaagatgaattttgtgtttgcgcttgggtcccatccccaagatatgtcattatgtatatgcacatattccaaaaatctgaaaaaatctaaaatttgaaacacttctggtcctaagcattttggataagggatatgcaacctgtattaataggttgtgagaagaacaattagaaaagaatgtctaattaggctccttaggaggatgataataagcaacaccatcaggttaaaccgtctctttagaagtatttgtctttaacaaaagaagcatatccttaccactttgtttttgtccagttatagtctacagtaagaacagcttaattcttttgtatcctctgatatttgtcccttctccccttccccacatctactagacaataaataacatggaaacatggccagcctgatacatgtccttattctgttctgttccctgctagtcccattctcctctggtcatttgggtaactgaactgattctgcattgatatttaggatactattcatgtcacagacatggcaatcttattgaattcctagccttcacttctctttgcagcaggagaagaaataactgtctacaggttggaggagagttcccctttaaaccttgataaaagcatgtcctcttggtctcagcgtgggagagcggcaatgatccaggtattgtcccgagaggagatggatgggggcctccgtaaagctatgagagtcgtcagcacttggtctgaggatgacattctcaagccgggacaagttttcattgtcaagtcctttcttcctgaggttgtgcggacatggcataaaatcttccaggagagcactgtgcttcatctttgcctcagggtaagtctgaaactcagagacccatagcccagagggacaagtcaaagaaaagagatctggctacatccttatctaaggccattatcctcaacccaaaggggagcctattattttttagaggtagtattgctttgtaggacttttgcttttggggcaggcagtggtgggagttgaataaggctaaaaatcacattggggtagcctatagtaatttcatgatcatagctgtacaacagtaaatcagtatttttatcagtgctccctattttgtaggaaattcaacaacaaagagctgctcaaaaattgatctataccttcaaccaagtgaaaccacaaaccataccctacacaccaaggtaagaaaatcttggcaccttggccctttgtttcaagtaggaatttctatcacgtcttctcagcccattactcatgagaaatcttatccatggggaaattccccatgatcttatttttggattcttccttccataatttcggagactggcaaaaggagaattagagaccccagagataccttggtgttaatcactggacttaaacatgagtggaaaaaagaggttcagaggctgtaactaagatttcagttatgggaaacagacagatcttgggtgttattaatgtccaggggcattatggtagaaaaattattcttattgtaagcatggtctcttcccccaatatcttatagaaagtaggaattttgtaagaataaactcatgttactttcacttgagtgtcttcatacacttgcattcatttattgagacacagatcataatttggtgctggacagagtaaagcttcattctttcatttacaaggaactttatagagcacagcaagaagagttgggtctggtactcataaaagagttggaaagttacctcaaagcaaagggaggtgggtaagcatggaaagaaaaattcccaatatttgcatcctatcccttccatagaaagggcaagggcatgtgcattgaggctgcatcataccagagttaggtaatcttccctgctgatgactgctcagtaaggtaagtcccacttttgctgtattgtgggggatcaatggcctctttttccctaacaggttcctggaagttttcttaatctactgccattcagccaaccagtggttgaccattgagaagtatatgacaggggagttccggaagtataacaacaacaatggtgatgaaatcacccccaccaacaccctggaggagctgatgttggctttctctcactggacctatgagtacactcggggagagctgctggttttagatttgcaaggtgattgatgatgtaggatttgatacaacaagcatgaggcaaagtgtaaagagatcttgcaagaaccaggatgggtaatatatggagttgctctatttagctttgaagggaggtgggcacatttatttcagagacattgtacagtgataatcatggaatctgctatgttatttcccacttaggtagggggaaaaatgtaggcagatgattatctatttaaaatgtaaagacatctaaatttttgagcaaaatggggaatgatttttgtaacaaatttttcagttttatgacttcacttagccttatgttaatatttaggcatgcatttatacacataggaacatttaaattctgggtgtttttcatgattttgagctcattgctttagcaatttataatttagcttgctctctttgctgtgtcccttgttacaacagttcatgaaaatacacagactgagagaggcaacacagcacactcttatttaatggaagcctttggtcagcacatctcctggctatcaatacctcacatgtgacttataatcctgcggcacaaaacagagtatctccagcaggctttccttgcagggacagaacaaaatatgtattgaggtcaacgtttagtccttaggctcactgactagggctttggttttaaataagagatttagtccaggaagttcatagaagttacctcatttaatcctagaagcagcaccttgaggtaaatattataggaatttgggcccagaaagtttaataacttgcccagagttgcacagctgcttaagggggagccaggatgcagacttaagctgttcttaagacatccctgttcttttcttttcactgttcttttatttcttttaagagtttcatatgtagagggtataaccatcttatggtttgtttaaacaacttgggcctttttcttgtcctgtctgactttcccagctctctggttctgggattctatgctgaaagccaggcttggaggttggagaatgtagagataagcagacagtcctggggcatcatgagcaatgtccggtaagactgcaaagtactttgattgaaacttgtgtcacatgctcaaggatgtgacacaaatttttaaactacatataagtgcattttttaaatgacatataggtgcttctgtcctttcagatttatgctgctcacagttgaattatatttaattcaattcaaacccaatattttaggaaacaatataaacaaagttaaaatgaccaagttgattcagcttttagaccagcaagtacctgatccctataaacccagagcattgatgcccaaggcatctatttttgtagctcaaattggagagaggttgattgttttcatctgtatttgactgtttgtgctttgagttttgggtggagttgtttaaaaaggaaaaacagaaacacacacacaaaaaaaaacaacgaaagaaaaactttaaggaattaatgatgactcttcagtgtgttttgtattccacttgaataggtttttgtttaatgatgtttatgtttggggatttttatgtctcttagtaatccaaagtaacattaaacagaacaaatgctgcgttgacagtcttgagggaaaaagagaattaactttattcttttaatgggcaattatgtgaattgcagaaataggccgctccaaataaacgatgtcaaaacattgaccttcaaagaaggaaagagtggacatcatagaatgaatgttatgaaatttgagatatttatcagagagttttggccaattggttagacctggatgtatggaagaatgtgaatcctataatagtaattatgaacagttacaccactactactagctaacatttactacgtttgtgccaggcacttggctaaaggtttacgtgcattattatatttaatccaaaccatgttggaaagggaaaatagaatgtatttttaaaatctcttaatggttttagttcagttttatattgtatttaatttatttgtatttctagtctttggagagataatgcacattgtctgggtggtggaagtggagacagaggctcaccagcagcagttaggaggaggagctctggagttgcaatgccggagtctgacttctggttccactgtgaattagctgcataacacggaggagcaaccaccttgagtcccacttccctcatttgtaaatggggaaaatagtattaggcacttaagccatagagttgttaagggcaagaattgagacaagttcctgatacaccgccttcagtaaatgttagtaattgttgctgtaagcattaatctctgtgtgactctttaatatggaggttaatctgcagttgcagggagtccgccctcagctgtgtggtcctgttggtgctgcagagagactgcagcttcagcttctatagaagaaggccctgctcagtgtgctgtggttccctaccgctttgagagaaagaaggagtgtgaaatactcgagcagtttattctttcagtttcttttcttcttctctttgctttcttccaagggagtgccaataactaaccccagaagctgccacaccaggtcagaaactgtactctaaggagagacctgaccaatttccaatcacttgtaattatgctgaagttttttgctctctttccacttaaaaaatcctacatgtgagggcctgaatcatcatcattaaaatccaacctttagttcccagcaacaggaattaaaaacaattgtatttcaaattacagtggtttatagcatttttttagctcattgtatttttcaacattaatttggagatattaatattaatttttagagatattaatttttttattcaacaaagcagattccagaatgtcagcattggcatcgacatcatcatcatcatcaattctgctactacataaaaaaatttccaccaagctacataaattggtagcttctttccaccaatgtacaagttcattgatgtactcaatgatggttgggatcagaatgtcaatcttgagttcctcataaagggttgctgcatattacctgacatgagcatttactctcttgaagtcagattggtacttggggctgctcttttctcctcttcttttcttttccctctcctctgctctcctctcctctccaattcttccttttttgtttttttttttgagacaaggtctcactgtgtagccaaggctggctggaatgcagtggcagtcatggctcactgcagcctcaacctcctgggctctaacgatcctcctacctcagcttcccgagttaactgggaccacaggcacacgccaccacacctggctaatttttgtatttgtttgtagtgatagtgatggggtttcaccatgttggccaggccagtctcaaactcctgggctcaagagatccgcctacctcggcctcccaaagtgctgggattataggtgtgagccaccgtgcctggcctattctctattttcacacactgaaaggtccttctgccatttgtgtgccccaaaatatgtatttattagttaatctttggattgtcagattgggtttaggggtataaagttttgtggatactctttaccctcattcttataaggagttctgttccttagggagcatagcactttagggaaatgagataatcaatcagaaacatgattttactagtgataaggaaataaaatttcacttcacaagaagttcttgataggagaaaaataatacaagtaactgaacattttttcagcttcctagggggcagacactttgctaagcagtttgtgtccagtagttaatttaatcctcccagtaaccctgtaagattaggcccattattattcacaatttcagatgataaaactgaggttcaaagagattaagggaggtatccaggtcacccaatttcaagctctaggttatttttctaaggaagtcagtttcatagggtgaaagtctataaggattacattttcttatgaaaggtttagcatattgtaaaacctacagacgatagcaaaaatctttttaaaacataccagctagaaaacatgagttttctcaacaagtagaaatacactaaaatttacaaattttatataattttaaaataatcttcccacaaggttagttgctttcaagcaaacagaagcatggttgattagagaatgatctcagaaatcgctggattgtgcccaaatcttactggctggcctggaacatttccatcagtggaaatcagcctcctcaccacttgtattttataagagattcactttaggtgctgattcctgttttgataaattttagctttacattgcacctatgttacctttttaggctttagtgtcatctttttttcaaaggtaaattttattgaagacttatatacgtttagaaaattcacataccataagcatacatctcaaagaattttcacaactgaatacacaggtgtaaccatcacccagatcaagaatttggtggtttctattctactgtttataagtagaatgaaagtataagtatgtggccgggcatggtggctcacgcctgtaatcccagcactttgggaggctgaggtgggcagatcatctaaggtcgggagatggagaccagcctgaccaacatggagaaacctggtctctactaaaagtgcaaaattagccgggcatggtggcacatgcctgtagtccagctagtaggaacacaaactttggctcagcattaatcctgttttgaccatgtatggactgtgcaaactctgacagatgacataattggtttgaacatcagtgtactcattgatgtaaatgaggataaaatgtaaaacgaggctacgaggataacacttttcttttataattgctgagaattacagaaaataaaattagaatatctgctatatacaagtggtaaatgaatgacagatgccactatcagtaactgtgaacacaccactaaaacaatcatttgaggcctagaagtttattataacagagggtttgtgggaaacagtgcattaactaaaattttcaaacatttctgaacaatttttatagtgcatttaatttacatgaatttttgagaattaaaatatttaattttttatatttagtttttatgtatcttcatatatttgggggtacaagtacagattttttttacgtgctttttttttttctttgagatagagttaagctctgttgcccaggcttgaatgcagtggcgtgatctcggctcactgcaacctctgcctcaacgattcaatggttcaaacgattcttctgcctcagcctcccgagtagctgagattacaggcatgcaccaccaaacccggctaatttttgcatttttagtagagatgggatttcaccgtgttggccaggctggtctcgaactcttaatctcaggtcatctgcccacctccaccccccaaagagctgggattacaggcgtgagccaccgcgcccagccagattttttacttgccagtattgcttagtggtgaagtatgggctcatgatgtttaatttactacagagtgactgtgagttttaaattaagaaattagaatttaattattattttcttgaatttctaagaaaatgaaatctccatttgctaaacgaattttgtttcttcttttgaggtgttggagaaaatttgacagatccatctgttataaaacctgaagtcaaacagtaagttaatttatgtgttatcatttagaaaattgcatttaacatatagtaaatggttttaaaaataatttacaaacatatatgttccctgcctagatcctagaaaggtttttaggtagcttatgtatatagaccaaaaacaataagattataaaaaagcataggttaggaaatggggggaaaatatggaaatatgtaaaatgatattaaatctgcagttagatttatacacataaatggaaattataaggactaatgcaaatttgactgagttcccaatgtgtaagtttagcctctgtggctttgatatgagagcagtgtcataggagaagcacagtttccttttttgtcttcacaatggagtcattgcatcttatcatgggcagcatcttccatcatatgcttataaaatgaaagctaggggcataaagtgtgctatttagtaacagcaaatcttatgagaggacaaaacaatggagcttaaatatgaagcatcagattatctgacttaaataagagctgaagtttaaattctatagagagatgactcatcaacctgccccttgaattcccatggatattttatcccagaagcaggtttttgggaagacttggcagtaaaggatctcaggttgtattcttctattaaaggtggggtagaaagaagtgatagtgagggttaaacactgatcaatatggctggcaaaaatggttctcaaataagagcttacatcacaatcaccaggagagcctgttaaaacacagattgctgggccccactcccagagtttctgcttcagtaggtttggggtagggccaaataatctgcatttcttacaagttcccagggaattatgatgctgctggtccagagaccactcttgagaactgccagcatacatttttacttcttaattgtcataattgtctatacttgacccctgggtggtagttttatatatatattatatatattatatatattatatgtataactacataagtgggcaatcaataaaatctgaaatttttactttccctccccaagaactcataaatattcactgctttagtgctgtgttattttactgagtgatttaatctaaacatgtaggcttctatgcaaagaggcccatctaaaagtgtattagatatttaattggactaggtgaactagagaaaataaaggtgatccatattgaacatacacatctaattcctatgatatttatttgactgtggagaccgtgttaccactcttatatacataaagactttattatgtttcactttagctctgctaaagtgtttttagctaagaatattatttcttcagtagtcctgtgtgcctaagggttagtagtaggaatcttgtactaaaagtactttataattttgcagtggaaattttttgcatatataatgaaccaagtttatgtataccccatctatcatttattaaattttgaccttggcatatgtcacttaatatgacctgaatattctatcatttagaattctaagattatattatcccacttgacaggtaggtatttaattgcatgctgtaggccagtgggcctcaatttctattaaagtcacctagggaacttaaaaacaaaagccaaggattggcatcaaattggaatctctgaagatagggccctgatatctgtatttttttaaagtttctcatgtgattctatgggcaaccagggttgagaaactctgtcttagggcaactttattttcttatgacttaaggataggaactctggaaactgataggatggtttcattgtggccttcctggttttgtggggttacccaattttggatgcagttggccttcatggtcaagataacaagaagcactattttcccatgatcatggggaattacgtctgattagttcaatggggctcacatttcgaatgccttacgtgtctgaagcacttgctacacgaagcatgggacgtggaccaacaaggtcagcatcaccgggaagatggttagacatgcaaaatctcaggaccctccccagaaatactgaaccaaaatctgaatttccacaagatcctcaggtgatccggtgtaaattaaagtttgggaagcactgatttaagcaagtgctttcacgggttatttattttagcctttgcaacaacaatgaaaggaagcattttcaatcccagttcaaaaatgagaaaacttaggctcagtgaagatggtaacgttcctatgaggagaaggggtcaatgaaaggataaccctctaccaaaagagaagatattcttgtggtataaattctcatattgtttctaatgcttactgtctcttaactttccctaaccttctgccttggttattggtcatttgggattacagttttttagcttgctgctttgatagttttgggcatttgacaagtatgaaacgatgatgagatgttctttagtagatctatgtatagatggcactaattagcgtttcctcgcatgtggaaccaagctaccacctgcttttcctgtgttgtgaaaaatctggaaaacagctacttgtattttttttaaaacctggttatctaagactgcaaggctctaggcgtgctgtagcgggtagatgcaaatgaatttccttacaactctccttcattctcccctacactgggagtggtcgaactcctgctatatgcatttggtattaattttgattcttttgtcttaactttcccaaagctcatagagggaaatcatttaacttacaggttttatctgagattcagtgttgcatctctaagttgggggtttttatgttttactgggaggaagaaatggcaggtatggaaagcaaatgagtgaaatagtctaacagggtcatgttggagagactatgaaaaggcattcttcaatttaaacgactaaaataaacactgtgtttcactttattggcatcgtagaatcctggtctaaatgctgagtgcttcgactttttttgccaccttcagtttcaccttattgaagtggttccttaccagatggacacaaagagagaggaatagttaacaagaggcagcttaggcagccgggtaaatacccccagagctgtactctgtaagagcgattgagtgaccaggaaagttaatcctgtgtgtctgttcactttgtcttcccaagagatttcctccacctactcgcctcggagcaaagaggcaatctgagatcaaactgacatcagccctcattctgagcttggcacatcttcagagcagctactgttattctgccaaaaggaagtggaaattgagataaatgtttcaatccttggatggaaaaaagtccatttttacaccacgtcccttttgaaaaaccgcattccttagaagcgaagtttattgtttccttttgtgatagtttgcttttcttttttcttaagacgtggtatttaagagcggtaattgagttcagattttaaaatgtgctgtttccactctgcatgtcattaaaataaaatattagctttcataaagtttcttgggaaatgtttctggtgtgctctgctctgtggtgtgcagtgtcaaaatccaaagaatgatggtcgcctttgatatgataacggatgaacactgatcttagaatctgctagggatttgttatgattatagagtattcaaaaggtgccttatatatactgattctatttgtaactctgtcacctacatcgagcatatgtactttacttccaccaacacattgtgtcatagtcttgtctttccacaaaaagcccagctctagcagtttgcaggagagcaagtggctttgaaagagccatgagtaaggatctagggtttagtcaggaatttgtttttgaggacggttattttcagaaaagtatttgggtttgaaacaatgtctatgcatcgttttagaaggcgtgtcccaaaagcaaatgtattttactttatatcttacctttggggtattctagtagaacatttggtaatgaatgtcactctttcaccccatatgcattaaaaaggatttcgctgtattttgttttaatgtggtacatagaaaattcactcttctatcagattagcgttgaaatgccgttgaaatgcgtttcacagtaggtcttggagttgggagcaaagatttaagtgcatttgaattttaaatttgcaaacctaacattgttgtttccccaaagtgctctgttttttgttggctccttcaagtttactgggttactatgggatactgttcggtatctcggagaatcctagttgagctcctttttcttagctgtgatctaattgatattctgatatttcctctagatcaagaggaatggtgtttggaccggccaatttgggggaagatgcaattagaaacttcattgcaaaacatcattgtaactcctgctgccggaagctcaaactcccgggtatgccactaacagttcttttttctctaagtaaatctctcatagaacaacatcctttgtaacctgggataaagtagaaaatcgtaatcacatttttatctcattcaccgtcattcgcagagcctgactctctgactgcaaaattttcaagtctctaaagggattaaaaggacagggatttactttaggttctgccaaaatgtgataaaacaacttggggcccaatacttgtcacagtcactccaaaagaaaagttccaccgacttaaatgggatgaaatctgaccgaggctggtctttgcccccgccccaccccccacatttgggtcctgccagctgcggatggccacagggtgttggccaccgcatttctattctattctaatttcgccattgggtacttgggagggtgtggtatggagggaaatgacaccctcaattaaagtagtgcttttcactgtaaaaatctgctactttgaacacacattgcaacatatatttttttaaatctgatttgataatatgacatacttaaaaattcctactataaaagcaagcagctggaggcctgtgccctccaaatgggcagtcctggctctgtttcattcctttcttttgtcccagaagggaagcatcatgtgtgcctcagcttgcccactacttttggtcacaccggacttgtccttacagtgggatttcacgtatcttaagctgagtagctcttcttgccttataataaatgatcataccccgaatttgaagtcagtaaaagagcaccatccatcgtaacctgggatgggacaggtgtaaacttataacaaacgaaggagatttctttttttttttttttttttttttgagacggagtctcactctgtcgcccaggctggagcacagtggcgcaatttcagctcactacaacctccgcctaccgggttcaagcgattctcctgcctcagcctcctgagtagctgggattacaagtgctcaccaccatgcccagctaattttttgtattttttgtagagacagggtttcaccatgttggccaggatggtcttgatctcctgacctcatgatccacccacctcggcctccccaaagtgctgggattacaggttggagttagaggtagggggagctcttgtggtgaaggcatagaaagacagagttggagcaggcttccagttccactgggaatatagtggtcagccaggggtggggagatcaaaatgcagcagtcagagagcagagggccataactctcacaactggccaggactcactctcacaaatcacatacctgatgtgagcaaagagattagtgcacagccaagctgcccactggcttctctggtcaaaaggagctcaggaaggggctgggactggactgtgagtcatcaggacctccaggtaagggccctctggaaggcaggagctgacaacgatcagagtcattccatgatggcaggctggagtccggctcattcactcaacatcctccgatactgtccttttcccaggtctgattcattcctaccctggaagggcagcctgcattcttgaagacacaagtactacatctaaggagccaggacacagggagacttgagacagaactcactacttccaatccttgagctcagttagtggtcctgtatgattaaggttgagataatttttttatactacactggtaggtgttttttgtttatttgtttgtttttttgagacagagttttgctcttgtcatccaggctggagtgtagtggggcaatctcggctcactgcaacctccgtctcccgggttcaagtgattctcctgcctcagcctccctaatagctgggattacaggcgcccgccaccacgcccagctaatttttgtatttttagtagagatagggtttcaccacatcggccagcctggtctcgaactcttgacctcaggttatccacctgccttggtctcccaaagtgctgggattacaggtgtgatacactggtaggttttgagtaattcaataattccaccacatctagtcctaattcatgttttctttcaaaaccttagtttttgaccaacatttaagtggaaataagaaatatccttgtttattcagacatttggtaatctaaataaaaaaagagttttgtctggaaaataggattagaggtgatttttcatttttgtttgactacgtttcccttcatatttttttatatgagaggcagtttaggatagtataaagggcataggctctgtagccagagaggctgaactcaaacattttaattctgctttttaccagctatatgaccttgggcttcagtttccttgtctgtaaaccaggcataatagcacctgtttcataaagtttgtgtgaagattgaattaggtagtatatgtattagtctgttttcatgctgctgataaagaaaatacctgagactgggcaatttatttaaaaaagaggtttaatgagcttacagttccacatggctggggaggcctcacaatcatggcagaaggcaaggaggagcaagtcacgtcttacctggatggcagcaggcaaagagagagcttgtgtagggaaactctcgtttttaaaactatcagatcttgtgagactcattcactatcacaagaacagtgcaagaaagatccacccccataattcagtcacctcccactggattccccccatgacacgtgggaattgtgggagttacaattcaagatgaaatttggggtggggacacagccaaaccatatcaatttacatgttcaataaatgttgattgttttattattaatatataatatgtattagttttatttccacataatcctcatttaacattaaaaaaataagaaatacatgttctaggctagcaaatacaataagtacagcacaaaaaggtcacaaacattttaactccattttcctccgtacatgtcttacaaaggttatgcctattaatattttcttttaacttttttcttttcaaatggaaggagggcttaggaagcataggatctgataactggatggagcttttattggctgtaccaaacctgaggtggagcttttgtcacagaaaactgaccactgagatgaggagtcagccttcttggctgacctctctgcctctgcctgtcattcagtagtaaaatgccccatttcccatttggtcttacttaactctggccagattatgccttatagggcactgtgtattgaagcaagcaaccaagtctttcttccctgctcccataaacagcacccaaacagcatagggaaggaaggggggtattggggtgggaaaggaggcttaatctagacatggttgagggtttgagttccacatatctatggtctgaggaagaggagatctctctgaacacttggcaaagcctaaagtcccatttgtcttcatgaacagtaggttcttggggttccactataacctttttacttgtcctccttgcagatttaaaaagaaatgactattcccctgaaaggataaattccacctttggacttgagataaaaatagaatcagctgaggagcctccagcaagggagacgggtagaaattccccagaagatgatatgcaactataaaaagggaggagcaagaagatcccagtgcttgccctgcctgccaggaactctgtgataacatagattgatcaacgtgatgttgattacatcagcgtctccttgggacacgccttctgagcctcacatctccttctgttcaaaggcctcattggtatatgatcaatgggttctcctagacactgacctctgtccagggcactttgcagctccatcctcaagttccacacgaagatgcttggatgagtcagctgggaatattgttcttgtgtacctcattgctttagctggtcacttggaactttggagcagaatcctgcacattaaaggatggggttgggggggatacatttattttattttctcactatgtatgcagactggaccccctactactatttgtcacctcacccacagattgtatttatgtctatatatatgttcataaaaagttatgtgatttcctcctctgtcttttccacaacataggactttgaatagcaatgataggaaaaacaatggaacaagggtgggtttgcacagattggagcacattcctgcacaaactaccaagtatactggtgaaatctcgatgggtttcagatattgtcagtgaatcatatgatgcctggatatttcaggtttctgtaaaagaaagggaaacctaaaacaaatacccttccatatataatatatatggaatatgtatattatatatatttttatatatataatatatatggaatatatatattatatatataaaatacatatggaatatatatattttatatatatatatatatatttttatttttgagatggagtttcactctttttacccaggctggagtgcaatgatgcgatctcactgcaacctctgcctcccgggcttgagcgattcttgtgtctcagtcttccgggtagctgggactacaggtgtgcaccactatgcctggctaattttgtatttttagtagagatggggtttcaccatgttggccaggctggtctcaaactcctgacctcagatgatccacctgccttggcttcccaaagtgctgggattacaggcgtgagccactgcgcctggcctttttttttttttttttaaacgagaacaagaatatgaagaactggaaatcattaagaaagggtttcccttccttaaagctcaggggtactattagttaggagttgactaactcaacctgtaaaacaccactcctccttccaaagttgtatatataatattgcaggttaaattactttatgtcaggtcctatgaagaaagatacggtttcagactgaaaacatgtttcacaggtgtttgcttccttccagagcagagttccctattcccctggcataaagaatgtatatatattttgaaatatggctgagaacatgtcattggtttgtgaggcctaaggtgaagcactcctggcagccacactgtgtagtgtatttgagggatcagtcatccctcttgtatgctgggcctggttgccctacctcgaacaagcaccagcttttcacacaaggagagatgtggggctgggagtcctctccccatcctattgcatctcctttcttattataagctgttccagttcacaggcagcaaacctcctgggtttgaaaaattccaacttatttttatctttaatcctgacattagctgacttgctagtgagcttgctttaaaaatctacactcttgcattcttaggcatacaggggaaatgttgaaaaggaaggtggaaaaccaagaatttagtttgccaatgattgcctctgattcttgtaagtttgagttccacaagggctaatttattccccttttacttgggttttggggtggtggaaagcgggaaatttgggtgatttgttgattggcaatgaggataaaatgttaatacttttttggggacttaacaactttatcctattctacaagtcagtaaaggaacaattggtactcacctcagtgctgcactcaactatggaaagaggcagagtttgcttgcccaattgccaaactaaagacatcagttcattggtcaaatatttgttacctggaatggaacttgaaagcaaatacatttggatttcaaatttc

SEQ ID NO: 398 - DNA, 5378 bp, Homo sapiens
atttaaagctgggaggttctgccaccaagcacggccttcccactgggaacacaaacttgctggcgggaagagcccggaaagaaacctgtggatctcccttcgagatcatccaaagagaagaaaggtaagtagagctttgcatttacattttgaaaaattacaaagatgaactcatttttttcctgagagcaataactatttggcaatgcacagccctggcaaaaggccgtcgaatgtgtttgaaggtgtctgttgttgtttttgttcaggacgcttgcgttttctatttcaggtgacctcacattcgtgccccttagcagcactctgcagaaatgcctcctcagctgcaaaacggcctgaacctctcggccaaagttgtccagggaagcctggacagcctaccccaggcagtgagggagtttctcgagaataacgctgagctgtgtcagcctgatcacatccacatctgtgacggctctgaggaggagaatgggcggcttctgggccagatggaggaagagggcatcctcaggcggctgaagaagtatgacaactggtaagctcggcccccgctgcctgtcccagcaccctgcaggcagggctcccctgcgtctcctgggagttggtggagaaaggtgaatgaaggccttcgggtagtttcagactcttgagaagatgaatgcaatggtcagaaccatacagacttgaattttgtgacattagtgggccagcccaagctttaaatgaggtgtgtgcacaaaagctctgccaactagattcctgattaaaaaaaaggcagcccctctcctacagaccaggtcctagtggagtaaatgtccacctggccatgtcttagatggtctgtgtgttcacactgatggactgttgttagcgtgctcagcactctgctaggcatggaaagccacggtactgaaggagatggttcgctgcccgtggtgcttggctgaaaggaagcctgtgatttttgcagctggttggctctcactgaccccagggatgtggccaggatcgaaagcaagacggttatcgtcacccaagagcaaagagacacagtgcccatccccaaaacaggcctcagccagctcggtcgctggatgtcagaggaggattttgagaaagcgttcaatgccaggttcccagggtgcatgaaaggtgagcggaacattgatttgattgggtaaaacagcagagagccttttcttatttacatctatcctaatggtaattcaaacaataatggaagctcccaccacctcagatgtctttcagttccatacatgaagttggcaatgtattgaaaatgcacatccctcttctgcttttacagactgtcttatacaaacgtgaaaactagttccatgcatatgggttttaaatagcttggtgggacccaattgcacatttatgaaaactctttaatttcagcaggctgttcactttccagtggcctcttctaacccagggggctggtgaccagcagggtgtggtggtgttagtggaacaccgtgaaaatgggtctacctgggaaaaaaatgctggtcgtgttcgaagtccaaggtcatttctcaccagtgcccacccatcgcaccctgtaggtcgcaccatgtacgtcatcccattcagcatggggccgctgggctcgcctctgtcaaagatcggcatcgagctgacggattcaccctacgtggtggccagcatgcggatcatgacgcggatgggcacgcccgtcctggaagcagtgggcgatggggagtttgtcaaatgcctccattctgtggggtgccctctgcctttacaaagtaagtgtattatttcagaatcaaaagtcaaaataaaaaagaaagctgaacgcaaaccccagtgagtgcctcggggacccccaagcagggccctggcgcactgacttgggaggggtccttgttcacagagcctttggtcaacaactggccctgcaacccggagctgacgctcatcgcccacctgcctgaccgcagagagatcatctcctttggcagtgggtacggcgggaactcgctgctcgggaagaagtgctttgctctcaggatggccagccggctggccaaggaggaagggtggctggcagagcacatgctggtgagcctgcaggaagccctgatgtgcagatgagaggcctggggggtggcagaaacaaacagcattacagttcccacccgtcagcacacctctctgagcgtgcaggttcccggacagatcgggaaaccccaccagtaatgattagtttacacatatacatcgcttttgaaggcccccaaacaccaggggaccatagagatcctttggacttcatgattctgggagtgtttgtttgcactgatacctgaagaaatagatcttgagggcctacattccaacctctgggctgaagtaccaacctcggggagaaggaaacaaagatcacaataaagaatcttgtccccaacagattctgggtataaccaaccctgagggtgagaagaagtacctggcggccgcatttcccagcgcctgcgggaagaccaacctggccatgatgaaccccagcctccccgggtggaaggttgagtgcgtcggggatgacattgcctggatgaagtttgacgcacaaggtgactcttttagacccaactcttggtaacgattggactcaagcgaatcgttggccttcgaaacatgtcacattctcctcagtccagtgtttggatttttaaactctgttagtccagagttggccaagccttagaaatatggatcctgtaagaattcttcaacttaatattcaatctggattgaaactgggccatatgttgctgtttgtttacatacatacatttgtttaaatggtattggtggaaaattgtggaggaagcaagagtcgtaaacgtatcaaagttgcatatgatgcttggatgaaaagagataaatgcatattctagggagggaaaaaagatttgagaagttggcatagaaattagtccggcaatatataagagtatatgttctgctttgcctggcactcactactgcttctctggtttaaaactctccaggtcatttaagggccatcaacccagaaaatggctttttcggtgtcgctcctgggacttcagtgaagaccaaccccaatgccatcaagaccatccagaagaacacaatctttaccaatgtggccgagaccagcgacgggggcgtttactgggaaggcattgatgagccgctagcttcaggtgtcaccatcacgtcctggaagaataaggagtggagctcagaggatggtgtgtccctgccagaggccttggtgtgccgggctgcagggactgcctgtttgagccaggcactcacgagcctttctctgtcttataggggaaccttgtgcccaccccaactcgaggttctgcacccctgccagccagtgccccatcattgatgctgcctgggagtctccggaaggtgttcccattgaaggcattatctttggaggccgtagacctgctggtgaggctctccttcatttaggctgggaacatgggtgtgctgggtaccgaagggcatctgtgaaatctctccttttccatgaccttgtcagagggtgcccaggggcttcctttcttgagcttccttcccaaagatccagaataattggcaagttcaaatgtagaaccaacccttctggtcacctggaacctttctgaatccctgatctattgtagcttgatcaaattttactttttactttgtggcctcagtcatgtaactttgagttagcagttttctgcaatttagcttggtgaacgcaaaactagctcgattacaaagttattgtcttgccgtgtctttccgtgttgtgaataacaccactggttgtggagtctgaatttcaaagcctctgatgaacatttctctttttttttcctgctaaaggtgtccctctagtctatgaagctctcagctggcaacatggagtctttgtgggggcggccatgagatcagaggccacagcggctgcagaacataaaggtaaatcaaagtcctgatctgaaaccacagagaagtgggattagagcactcttcgtcactcttatgtctctctccttttctgtgtctgtgtgtggggagagagagagagagaaagagagagaggagaacaaagcatgctaatgtcaacaatcaatggcgtcagtcttgcctaggagagcctcatttactaatgaactccctctctgtttaacaggcaaaatcatcatgcatgacccctttgccatgcggcccttctttggctacaacttcggcaaatacctggcccactggcttagcatggcccagcacccagcagccaaactgcccaagatcttccatgtcaactggttccggaaggacaaggaaggcaaattcctctggccaggctttggagagaactccagggtgctggagtggatgttcaaccggatcgatggaaaagccagcaccaagctcacgcccataggctacatccccaaggaggatgccctgaacctgaaaggcctggggcacatcaacatgatggagcttttcagcatctccaaggaattctgggagaaggaggtggaagacatcgagaagtatctggaggatcaagtcaatgccgacctcccctgtgaaatcgagagagagatccttgccttgaagcaaagaataagccagatgtaatcagggcctgagtgctttacctttaaaatcattccctttcccatccataaggtgcagtaggagcaagagagggcaagtgttcccaaattgacgccaccataataatcatcaccacaccgtgagcagatctgaaaggcacactttgatttttttaaggataagaaccacagaacactgggtagtagctaatgaaattgagaagggaaatcttagcatgcctccaaaaattcacatccaatgcatagtttgttcaaatttaaggttactcaggcattgatcttttcagtgttttttcactttagctatgtggattagctagaatgcacaccaaaaaaatacttgagctgtatatatatatgtgtgtgtgtgtgtgtgtgtgtgtgtgtgtgtgtgcatgtatgtgcacatgtgtctgtgtggtatatttgtgtatgtgtatttgtatgtactgttattgaaaatatatttaatacctttggaaaaatcttgggcaagatgacctactagttttccttgaaaaaaagttgctttgttattaatattgtgcttaaattatttttatacaccattgttccttacctttacataattgcaatatttcccccttactacttcttggaaaaaaattacaaaatgaagttttatagaaaaga

SEQ ID NO: 399 - DNA, 25566 bp, Homo sapiens
cgctgtcctgggtgcgcctcgggccgctgcgctcctggccagctccccccagcgcctgggaggcgacccccagtgcgcccgggttcaaaggcccggcgaggcagttccagcccctctggggggcggggaggcgacgggggtggtgcagaagccagaaaagcccgagccacagccggccagctccgcgcagggatgggcagcgcgctctgaaagtttatgaccgccgcagccaactcctggccggagctggagacgcagcgagcgatcggccggcctcgaacccccacagctggagggcgaggccagctgtacccggccccagtgccctttcgcggccacaagcggccgtcctcctggtccggtgctccggcgcctgatctaggttcatggagccggggctgtggctccttttcgggctcacagtgacctccgccgcaggtaagcgcacggggcggcgcgcctctcctggcgcgagcgcacacaaaaggacccagggcgggggacccgaggcgcggagaagatgtgcgtcgcggggagcaaactcttgcctgggctctgcactcgtgaagacgcctgggggagggctggggagcagaagcggcgcgcaacgactacccgcacgggctccgggagttgcagcccgcgcactggctggagacctgctgcctgggccgacttggtcaatttttcatgaaactggggacttttcagaaagtttgcgaactattcagaggctgtgccaaaccctggcaaagtttgcagaaagtatgcaaaatgcatgcaagttttcaacgggtgcagatagcttgcaagcttttcacagagtgtgcagatagcttggaaacttttcagaaactgcgcagagctttggaaactttgcagacattttgcttgctccacccccctcctcaggtgtttgggggtggcgggtgttgaggggtctgcacactcagcttaggagcccctcaatctgccttctgcaggattcgtgccttgctcccagtctggggatgctggcaggcgcggcgtgtcccaggcccccactgcagccagatctgagggggactgtgaagagactgtggctggccctggcgaggagactgtggctggccctggcgaggggactgtggccccgacagcactgcagggtccaagccctggaagccctgggcaggagcaggcggccgagggggcccctgagcaccaccgatccaggcgctgcacgtgcttcacctacaaggacaaggagtgtgtctactattgccacctggacatcatttggatcaacactcccgagtaagtcagccttttgtggtgaggaacgtggctcccggaccaggcccacatctgctcattcccaggaggacctcactccaccccagccccgctcagttagcccagagcctgccctggcacagcctttagctcttgctggggcctcttgccagcccaggtctcttctgcaggtcaggggtgtgacccacatcccccctgagggcctggcccaagagaaactcaatcctgagtttgatcctgtggaaggaggagccctccctctgaatgaagtgaactgaccagggggattagatacctgagatgtctctctgagcctcttttctgagatagagaaagccccgaaagtttatctcattccccaggggccaagggggctcatactcactgttgaccccaccaggatccaaggggtttaaaattccttgaaagcatcctggtctccagggagtctaagggtgggtttagctgagcctgacagaacctgcacagtccactcggggtagaattcccctgggatgggctcccttccttcctgtgggcccccctggatgccaaggcagggtgaattcacatcagctcgtccttgggccttccacaggctggctccagtcacccactgccatggtcacagagggccttcccttctctcctgcagtccttagaaactctcttaccctagggcctagacagcaccatcctgaatttgtcttggggttcgtccagtggggaagtcagccttctcctggggccatgtggagagagtgtggctctgacagggggaggctttgatgactcccagtgttcagggaacccctcctgcaggcacatcatcttgcaggccatacagagggcttgaccttgcctgggtcaccaactctctggcattggcttccccatctctaagatctgggacttggatcagacacctctaagttctgttccctgggtgttcatgggatctcttgggactcttgcttgtaccctattagggattcttagctgagaactcagagatggttgtgaatgcaagcccctggaagcctggaaaggcacctttgccaccgtgtcccggagccgtcttgattcaggttcctcacggtcacctttatccccaagccccataacctctgagcccttggtagcagctttcatggggctcacttacctaccttgtgtcatcggcacctcaaaaatgaagtgcagacgagggtagtaaacctgaggggtggaatgtctttcagaccaggggacaagacctctaatcacatccatgatagatctggaacatcaccccaccatgcttgaagggcaggcaggggcttcacattgagccagcaggacacgtgcacaaagtcctgcactcagaaagactctggctcggcttaaagtcctgctgtcactgtcttgaaatccttaatactttctgaacaaagagctgcacatttgcattttctcctgggtcccataaattctgtagctggtcgtgataccctgatttgctggctgggctgtgtccacctagaggatgggaggtgcctccctgtttctttccctttgtggggaagatagaagctgtgagtgttgggccatcatcaattgcctcttatcctcagatagcgaggggagtcacctttccttgtagcccctgcaccttggcactgccctttctgattcttatcctgcatcattgtgctctgatcaaattcacttcatagaatggagggcactgggcagtcaccaggaaccgagttcttgtcttggccagaatccccagctgtgaatctagaaggagaaagaagaaagctaatggaattacagacaggaacctggggtggtgggcaggtgggagaggatttggaaaccatctctttcattcgttgcctgtttaccaaaccccggagcactggctggggaggaagtgatgacttgagacatgtctgagagtctcaaccaacaccctgtgatctgtttaaaattctgtctcatgcatcctgcgatctgtttgaagtcctgtctcatgatttcgagtttgtcctgaaatgaagctgtggctctctgactttttccaggacagccaacttgataactttccccctgaagtgtgatttacctcttcccttccttcccgacactggttcaatttaaacatgatgaaagaaggattaaatctggtgtttgggcatcccctgagctacttgggaaacaaaaacgacaatagccagacttgagcattttgaaattagacaggtaaaataatttttatgaggcagaacttcccaaatggcctccttccctcccttcctgcctccctcctttctttcttaccctccaaacttcctcctgccctccctccctctccccctcccttctttccctctttcctttcccttcttttccctccctccttcccttccttcctgaaactctgtagatgtgtagataggtctgttgtcatctttaaaatatctcaggcaagactgcaatttgagaaaatgggctgtggtgacagggaacaggagtgatggggaggaatctaaaaaatcactgaattgagcaaaagaggcactggaagtgagggacacagtcttttctagtggttctgtctccccattagatcacaaccccacctgtcacatgttcccctctcctgctgtcacgccctcttcattcatggactggtctccctctccaaacttctccaccaggtgtgatttctccctgtcccagcggcagctgttctgggcacgagaaggagccttgattcttgtgcctcagtcaggggtcttgaactttgggtgcttttcacctttcagagcctttcctcccatggcgcatccagctgcgtgaagacagaatcaacactcctagttgatctttgatggaaattgctctgagtacggtcatttttgctcccttcgaggatctgagatgctgcaggagtcatattgggagttactaccgagacccgctttgcatctcctcaagggaagttaactgtctagttcaggctcaagagactagttggtctcttaagtctcttttggaaagaaggtctgagattcctcggctgtccctttagccctcctgcttttttcccctccttagtccttccagacccgagcttggtcggccctttctgttagcacccagcatggcatggatgctcaggaaatgctggttgacttttggctaagtcctgccacctgggtactctggctcatctttgctgttgctgagcccctaaatctccagtgccttctcccacacaggaggcctctttctccaggtgcctggctgctcttcaggggcctgcacatccctgtagacaggggtgggcaagagagtttttcttggggatgttgcccataacttctgtgatatcttcccaaaagtccatcgccccaaagaggaaccaaatttatacttaccctgtcaaggctgctgggatcacagttcatcaatgggatagcatgatttccattagcctttccttggctgtcccccacagtccccaagccatcccaccactgccaacaaaatcaaagtcccaaatcagagaaaaacatatcccatcctattgtcatggataagttgccaagaataagatagtaaggggacaggtggtgaacaaggggtccgtgtgctgatgtccttgtacactgcggctgtcctctatgagcagactgaagaaacagataccaggtagctggggcctgtaggagtcagggttctctagagagacagaaccaacagggtgtgtgcatgtctgcagattatgcatatatcagaagtgcggttgccaaaggaaatatttggttgctcttgggggccatggacttttatggaggataaacagaagttatgggcaatgtccctccagagatatatatatggagagagacaaagagcaattttcagaatttggcttacatgattgtgggggctggcaggccagaaatctgcatgccaccaggctgaaaattcccgagggagttgatgtcaaggaggtctggaagcagaattcttttctgttcgggaacctgtcttttctgtgaaggccctcaacagattggatgaggcccactacattttggagggtcagctgctttgctcaaagtctactgatttaaatgttaatcacatatcaaaaataccttcagggcaacatctaggctgctgtttgactaaacaactgggcacagtatcctagccaagttgacacctaaagtgacccataacggggatgtcagctcgaaccacatttcatggcggaccagcccctcagagcctggctgaagactgaaaacctgtttatccaatggctgactgagctgtgaagcacccagcaaagagccccactgtgctcctccccgccccatgagctgagggatcctgccatctgttcatccctctaaggacatctgagggaggcattgtgatgctggatggtgactgtgttttccaaaccaaaatctgacacacatgggctggcagataggaatgtagttatgaaaagaacagggcaggatgttgggaatcatgatcatggtggaaaatttgggatttgcagtcccgacttgtggagaagactccagaacccagaagtgctgcccttgagtcctggccatgactatctgtgtggccttgagccaggaggtgctgttgcctctctgtgaccctctggaaggtgcagacatcagccgctccaggacagtgagctgccaagtctctcctaatcccaacagtctgatcagctcctatcaagatgcccaggccggcttcccaggctgccctggatcaagccacactaaacttaatccagcaggaatgccatttcttttgagtttttttctcccctaaatgcataaagagtaaaaaaaaaaaaaaaaaaaaaaaagcattaacaaaacatttaaacttgtattttaatgtattctaccacaaaagggcagcatcacagattctggctttgccttctgtgttcttcaagaaaggcatcttggcatggtctcaagaagagatattccaaattttagaacatcccaatagaacggttggatctggaaccccaacttcctgcacatgaggagccagctgagcaccagaatgtgattttgggatcccgataaaagtcaccctgggccaggcgcggtggctcacacctataaacccaacactttgggaggctgaggtgggcagatcacttgaagtcaggagtttgagatgagcctggccaacatggtgaaaccccgtctgtactaaaaatacaaaaaatagccaggcatggtggcatgtgcctgtagtcccagctactggagaggctgaagcaggagaatcacttgaacccaggaggtggaggttgcagtgagcagagatcacgccactgcactccagcctgggtgacagaccaagattccatctcaaaaaaacaaaagtcaccctgacctgtgagccacacctggcagtatcattgttggacatgtggccatatgaggcagagggccagtctttctgccatcatggttttggaaaggggtcatgaatagtctgctactaatcatggatggtgaggatggctgaccatgactgtgacctcatgtcatctcatgggatcagcttgacagccccattagttggatgctattgtccctgtagtttacaggaagaagctgagcccaggaggcggagtcagttggccaaggttgcagagcttgtgagtagggactgggctgccagcccagaagtttggccctgaagcctgccctgtaagcctcctcctgtgtgcatgttcccaacatgggcttcttaggtgactaatatgccatcttagatgactcctgctttcgttcatttaatatgttttcccagagtgcctcacctgggtcagtattgaatggggctctgggacccaagaatgaataaaagacatggttccccatccgtgactgattaagggtggttttgttctttttgagacagtgtctcattctgtcgcccaggctgaagtgcagtgatgcaatcataggtcactgcaactttgaactcctgggctcaatcgaatctcccacctcagcctcccgagtagctggaaccacaggtgcgtgtcaccatgcctagctaatttagtaatttttttttttttttgtagagatcgggtcttgttacattgttagggctggggttttgttctttttgatagtgatgattcatatatataattctatgtaatcatatatttacccttttgcaagattatttttattaacatatgttaacacatgggcaaaacccaaatccttggtccatcacaagtcctaaattttattctggaaatgtagccttggcttgcatagaagcatgtgattttcctttagcctaccagagcccttggtggtttctctgtgggtaagaggggctggttgagtgtgcactccaagcaaaccagaaggtttgtcctgatgtcagagatgctgggacagagggggctgagtctaggcgagagggcgagggacccccaggccatgagtctcattcctggtgcaggatttttcttttcttggctgctgctctgtgccttgttctgtcttcttgcttcttggtgtggttacgggagcagggcagacataggaggtgggactgctcaaatccatctcttcttgcagatccagcttcacactttggtttagagactcctggggtttagagaggaatggggcctggggcccactcatccaaattgtcacgtggaggaggaacagatccctttgtaggggttaagagctcaaactgtgggctcgaatgcctgggctgaaatctggatctgccacttaggagatgtcacctctgagaccttcagtgtccccatctagagagtgggggaatagatagcactctatgaggaaagatgttttcaggatgacacaagaaagtacacagggcgtggttagcacagcgcctacaatctagtaaacactcaacgtcttgaagatggtggccacaatgataacaacacaacctccagccctgcagaagcccttcctgggccaaaaccagtcctcctgccatatccaatcctgtgattggaggatgctggctggtgagtagaaagtccttgctcaagttctgctggggtccacctctttggaccttctgactctgatcttagctcctggagtgccccggagcaaacctgtccaccctgtcccctgcaggacggtctgttagcctcaattagcagaaagcttacagactctgggaaaaggtgtgcctggctgtctgctgttgctgataagcagcctgataaagactctgtggtcaaaggttgctgggctgggctgagattcagtcccgcccttccagcccctcctttctgctttctattgcttccctctccccttggtaaatcactgaaagttttcagtaatggggcatggcgctctttgcgggcacccgtctggggctgtgtctgtgaaataggaggtaggggtggtgattggggtgattagggtctcagttcaggagaacaggaatgatctgtttacctctttgttaaacacctatgctgagagctctgtgaggcatctgtggctctcatgtccttggtacgtccagcagagtagatataatgccttgtaatttgcagctgaggaccccatggggcaccagtagcctcacttctgacttcacccagcattgcccaggacctgaagtgggtgtcaccaactgggagtcaccaggaagcaatcgaggaaatcccacagacatctatttagaaaacatcatttcatgatgtgcttttgagacgggcatgtgaaagaagagggtgttggccagattaaaagggaccctgagcttgaggttctgactgatcatggtttcaggaggtttttcccctcacataaccatttctatctcttccttagaaattagcacacttttgggtaccagttttgagttggagtggcatatttcttagaacactggacggcaagatacttctttaaaattggggagacttagggctaagtttcgcagtttgttggaaaggtcagtcctacgaggacttttctgttggggatgcacaggtagaaagcccgttttctgccccagagtcagcaggaagtgtgagtggtccaggaacaaaaacagacttggtggaatgcaactaatctccacttgggagacagagggacttgaggctggaaggcagtttgatttgtagcaagaaaacttggtacaaagaggttgtgaccctgtgtgaccccgagggagaatttggatttgtgctagatgaaagggccattacagtgaggaacttggccttcaatctgaaggcacatgaaaggctctgatgtgtctggtcatgtttgttcctgcaagaatttaaaacaaaggaagctgggaggcaaacaatgcttctgctttataattccagttccaaacctcagagggggagctgtaaagggtgaccctgtctacggcaccaccccgcgttccagtgtattggaagtggatggtctctgttttgcatgagaaagtgacctggtctccttccttgtcatgtttcagttgaaacagagttcctcaaaattggaaatgcacacacacatacacacagacttttgcccactttggaatagaaattaattgcactcggaaaataaattgcagagcatggctgagtacagacagccacatgtgaatgaattgtttgtccgcatagttttgggggcttcggaatcctggctcacccaccaaacctcccaagaatagacagacaggatgaggcatcagctctctttctcatctgccccacctcagagtcttaggagggccaagagctttgggagaccttggggacattcacaggcttggaagcactggcctcttcttcttttgtggcctcctcagggcagacttggtgggagctcttaataaacagtaactcaggaacagaacagtcagggaggcctggtccctggcccagtaattgaaaaaccagaaacagcttcatttcatatgcattgatgacaaaagtaccgacagacgcaaccaaaaacatgactggcccgctggtggacagtttcgccccacaacttggggagcgcaaattgctttgccgagagtcagaagcaactacatgagacagcagaggtccatgtaacttttctggatttttaggaatctgatttccatgggtctcttgcagggctgagaatagactggggtgagtgaggcactccctcatgtacaaactttcaggaggcaccagaaagtaggaaaaaacaagtaaaatgtaatgcactattttcagaaagccaaaatgagtgcaaaaaaaaattcataatcgaccaaatattgtttttagtaaaggcaggatccagccctgagcttgctccacttacctcacctgcctcaccctaatcccagccctggcatcttgcttgaggataaagcctgtgtctctaatagagactcagtagtttgaggtaagtgataaatctattggagctattactggaaaggggtcccgatccagaccccaagagagggttcttgcacctcgagcaagaaagaattcaaggcaagtccatagagtaaagcgaaagcaaatgtattagagaagtaaagaaacaaaagaatggctgctccatagagcagtggtatgggctgcttgattgagtatacttacagttatttttcgatcctatgctaaacaaggggtgggttattcatgaattcctggaactgaggttcccccttcctagaccatatagggtgacttcctgatgttgccatggcatttgtaaactgtcatggcgctggtgggagtgtcttttagtggctaatgcattataattagcatataatgagcagtgaggacaacagaaggtcacttgggttgccatcttggttttggtggattttggccatgttttttttttttttccacgtcctgttttattagtgggagtctttgtgagcaatgtcttgtgtggacctcccgtctcatccaatgagtaagaatgcctcaccttctggcaatgcagcctcattctacccagcccctattcaagatagagttgctctggttcgaacacctctgacagagctaccaaaagggcattacacaaggacacagacaattaggttaggtggaagatgagcgtatctttacggtcattgtgatggtaagcataagtcttgctcatgaagatcttttccatccttaacctggtatctcctgaaaattagcaagagtgtcttctcttgctttctttaaattattcaaagcatgtatcatggtgtcggcattttttttaatccctttgcacataaccccatccttatgaaaatacttgctccctgttttccctcttctctttccactgctgggaactattttgagccctgtctgtctgcagctttgcataaagttataatgaggctgggccaggcagccatggatttctcatgcctacattcggcctggaattcagaagggtcactgggggctggggagagaaactctagcctaactcgtttgatgcattttggttgtaccagatggagggaaactgctaatctgtaggattccatagacggcttaattccccaagttttggaggagtttgtttctctaattttttttttagccataagtcttgaaaatcctgcaccacataacaaaaaccagaggtatttttctgttgttctcctttcctttgaccccctggtgcttcctccaagtatccttaagtgtgcaggtgcctgtgttaggggaggaataggtctatggtccaatgagctgatgagatgataaatgctgcgactttgagattctttttaatctcagccttatggtaataggccatggaagagtgtaaacagtttgggctaaggctttctaaatacagttgatgagatcctgggaaccacttatcttgggtggagtggagcacctcactttgagtttggtgttagcgctggggcaaaggtctaaggccttctccagtgattgtgctatttaaggatgttcaagggatggtgagggcctttggaaacatctgagtggagtttggagccagagggaccctggagagacccagccagcccttttgtttctcagggccagaaggaaggtgcccacctttcctgtgaatgagtcatccttgggactagaagcctgggtcttccagcttagtaaagcctctgttttgctctggtaccttacccatctacgcagcctagtttgtccaccaaggtgctgatgtggcctgcaggagttattgccaagacataattcttccacttcaagtaatctagaggccacaagtaatctagaaggttttctaggaaaacccctcaaagaccagctgatgaaggacaaaataagtagagatccattgagtcagccaagaatgtcatatgtttgggacactgggtagggctgtgcagtgatggctcatttggaccctattcattcattcgtttaacaggtatttattattgagatattgggacttgattttgagccagacatggtgtcagctgccctggatggagaggtgaatggggcagacacaaccagtggctccggctggacaaggtcctgctgttgctgagccagggggttgtgcctgggccagacaccatctcttaaatgaaacgaaggaactggccctcattcttagatctgattggtaggggataatgctcagtattctttttgaaaatgtatgtgatactgttaaaattctcaaacagccaagtcctgggtaaatccaaaggttttttgagggggaaaggagggggatagagtaattttttaaaaaggcaacaattaacccacagcacattgctcactgcttttggtatttccaaatattctagaatcatgggctctttctgagggctgcgggagatggacttcccaccttgtggggtggtgggatgaacggtctgccttgggtcctcccaactttaagccgtgagaattttctgcagcagaaggaaagctatgaattgccggttcactgttctgatgtttaggaagcataagctttgtataatattctttagaaccagaaagcgcctgtgtgtgttctctgcttatataatgaggtcactgaggagctatgtttcctggcctattttctttcctggaagttggaagggcaccccatgggctgtctggcataaggcctggcccacagcagactttcataagcatttgatgagcgggcaaggaataagttcagtagaggacgaaacttctgaggtggtcaaatgagcgtccgggggtgggctctgagcctcctgggaaggaagggatggcatgcctgcctccacctgctgaaggacagacagtgggcagcgggcacacctgggggaaaggaggggcatagcctgcttccacctgtggaggacagacatttcacagtgcacacacttgggggaaaggactccagccagcttactgtgctgggtttgtcctgattctgaacatgcttttctgtgtgttgtcgcagtgaagaaaatttttccttgtcctcaacagctggggagactacaagccttcctcttatacccaagagtctgtggttgccatctcatgaaagtgaggtccaggatcagccagagttcactggtcacaagcaacagaaacctagtctagctggcaaagcacaggaggagtttattggaaggacacgggaaagctcacagactggaggcaagaagaagccctaggctctgaaaggagaggtgttaggacaggattgggggtctaggggtgcaccaaatggacaaggaggggcggggctgcttggcaaattgtagctccagagtgttttctgatctcgagttgcccctcttaggagtcttgggagagagtgggtcctattggcccagtttaggtctcctgaccagtcctcaggcagtggtaggtgaggcccatcaattgactgccccccagagacctcacacaatggaaggcggataattctccaaagagaaggtggcagactggatcctaggagacaaaaataaccaatgctggcctcgggctccagagaattccctgcttctcagtccttggagtgcaggtgctcctgttcctggtcctatccctcccctttgtctccatgtgttgtgcgtagcagtgtctgctggatgtttgctgaagcaaagggtcactttcatgggcctttgaatagtcagccacttccacaccagagattgcatatgtaggtgtgctggagggcattttgttttttctaagggtatttggattaatctttctatttcaccctgtcttagtcattagagccacgttctgactggttcagattacagatggtaaataaaggtgattgacattttcctccctgcccaggcagacatttctaagcttgggagagttgatgagtggtgccttctagggaatgtaataaagtctgaaattgagctgtagttagaaagcatgcgagggtctagaagttgtttctccagggaatggcaggaggtagtatccaatgactgctggtgcctggcagctgggggctgcctcctgactgtctgccagtgggaaacagttgtttctcctcctcttggccacaggacaagtcacagagccatgctttctgtacaatatgtcccctgggccaaaaggcaatattgcctctgctttcccagttcagaaggaaaaatgtgaaccgaggaagcagatcatcaacttgacatgtatcctaagtgtgacatgaacatgttctatttgttggggagacactcaagtcaccagctgggctttttaaatgaaaacaacacctctatttaaatgaaacaacgcctctatctgtaaagaggaaaatagtatcaggtactcattttgttcatgtgtcatctgacctatctgccttcgctttatggaataaaccactagactaggagttgtaaactcagatgctcctgagggccagacacataaaaaagatgagcgaagggggccaggtataaaactactgaaaatggtggggactggggcagaatggagggtttacgcccagtctctgagatcattacccggctgccatgctggaatatgaggttggtattagcacaacttccaattcttcaagaaaagctggaaatcgggatgtttatgtgaaatttccggatttaacaaaaaacactatggttcacgcctgtaatcccagcactttgggagggtgagggggtggatcacgaggtcaaacgactgagaccattctggccaacatggtgaaaccctgtctctactaaaaatacaaaaaaattagctgggtgtggtggtgtgtgcctgtagtcccagctgcttgggagggtgaggcacgagaatcgctcaaacccaggaggcggaggttgcagtgagccaagattgcgccactgcactccagcctggcgacagagtgagactctgtctcaaaacgaaaacaaaaacaaaacactgttgactgaaaaaagctgacaaaaatgccaatttgctgacctcagtactggattaaaagtgtatgtgtgcagggcagggccccgccccttgtctgtctttacataagttttacccggagtctagtccagcgcctgcatgttgaaaagcagttggcaaatatttgttgaatgctattcagttgtggggggtggaataaaaactgggttttcaatagggaatgacagtttgataagctttcctaagaatttagaatctggtcagtgggaatatctgtgtctcttctttaaacttcagatatacaggccagtctcctgatcagaaagatggagagtgttaattcattcatgaaaaggcaacacggaacttaaaaacagaatctttaaaacaaaagtcagctttccttatttaaaaacttcttgtagagagaaataaagcgttttcagtgtggtgttgcagatgaagaatgaatatgagagattggggaatttaatatttaataacacttatacatgatgtttgggaaaacgtgacaaataagaaacatttgataaaaaagactctgttgtcaccacaccaatcaaataatgaatgttctgaatacataagttgagtgataatttattggatgaacacacacaacaccagagattgcgtatgtaagtgtgctggagggcattttgttttttctaaggatatttggattaatcttctcacctgcttttcttttgcatggagctttgttttataactgagacatgaacagatggaagagctgcctacttgtataaaggattgtattctgaaaaccccgttgtattatagagcggtaggccccagccactgggcagggcatgctggtcaaaggttctccgccaatttcacttcacgttcatggtccaccgttaggtctttcctgttcactactcagtaaacagccagcgatgaagcaggccacaaatgaaatatgaatgctcatgagatatgagtacgttatcactactgaaatagaagtgctcatgagctggtaatctggcgtcagagctcggtgagaaggtggtgtcgaatgaggtgacctgtggccttgggctccttattacccttctttattgctaagtcaaacatctcaaatgccaagcttagtaggtgggacttttctgatacaactcacttgacctcccagaccagataaataacaatagtagctactgtttgcttatggcactttgctaagtattttccatgcagtatctcctttgctttgtccagccacacttttgtcgaccaggaagttgttgagagggtgaagtgatcatcatgtaacataagagcagtattaccaggtcatgtgtctctgtgtgtaccttgcacatacctgtacctactggccttttttcctttacctgttttcgtagtccaacagcatataactcctgaaggcatggacacatagggatgtgcctttctgtgtccctgtgacacttacattgataccacgtatatagtggatgctgaagaatgttggagattctttcagtgatttttgtggttattgaactctttagggtgaaaagaatcctgtctcgccagactagaatgatctcaccatgaattaccagttgctcaatcaataatctgttcgcctggccttgtgtgaggcccatggtgggtaaaaaagaagtaaaagacctgccctctcttttgaggatccagtaatctgcctttagacttgggtaagaaacactgcaactctgggccctgtgggttagaggactgcctctgacgccactctggccatgcctcccaccccactgtaagagtctgggactcaaagccatatgctccctcttcaagaccatgttccaggtattcaggggctggaattccctactcacgcatccccaagaccacttccagggcctgacacttggggatgagcagggctccaggtacatatctccaggcctgcagggtgacagctgcttacaggatgtagggtggaaggagcttggaggaagcagcctggggcatgcacggggagtgcttgaagccagcgctggtgtgggatggcgcaggatagcagagaaggtactgggcctccaccacatgtcgatacggagtggccaggagcccaggattctaaattaaaagctggacctgcaaggcagcatttggaagccacatttgtccagatacaggagataacactttttcgtttcagggcttatcagatcgattgaaacctttaaatgattagccctgtgggaggtgggcctccatcgcgaactctcattccagactctacaatgtcagcggcaggctctgctgggccgtcagcttccctcacctccgcacgggtcggtcagcagactgcacacccggaaggcccaggccttggtggaggggtttctgtgcctcaaggctgtagggcaggggagggggccgtgcctctctaaactgccagagcctgtttgcacaccagcactttaccgcgcttggcggccggggaagtgctaagcctgtcttcattaacaaataccatgttgccttgtttccttacttaaaacactttggagtgttttggctcaagttgaggggctctacatgtgcaaatgcataatcagctgacagcagtttcaaaattgcaggtctcactattgatggagaaatgggagcgttgttattccttgtgtgtaattttctccaagaaatggggggattgatttaatgtcaacactcagagatttaatgtggccctgttactggaaaaatacacctttgccaaactctgcctcaaaacaatgtctacattgtcttgctgcactccctacccccatttcccattcctgagaaaaaacgggcttgaaggagggttcagctcaatacagggctggatcctgccctctgtctccgtttcctgagcacagatggctcatcagcggggcctgtctctgcctggagggatcccaccacctctgtttctgaggaacttgggtgggagggagttagtggggagaacaagagtcaacgaacagggtggggtcagttttaggctcttgtgttcaacccagcagggaggcgggggcgggggactccctccaagccttaggtcactatggggcttcctggcccaatttgccctcactgtcgcaaaaaggctttatggtgtgtgtttcaaatgaaaagaaattcaatttgattttattttgaaaatgcagcgaggggctgggcatggtggctcacacctgtaatccagcactttgggaggccgaggcaggcggatcacaaggtcaagagatggagaccatcctggctaacacagtgaaaccctgtctctactaaaaatacaaataataacaataataataattagccgggcgtggtggcacatgcctgtagtcccagctacttgggaggctaaggcaggagaattgcttgaatcggggaggcagaggttgcagtgagccgagatcgtgccattgcactccagcctgggcgacaagagcgagactctgtctcaaaaaaaaaaaaaaaagaaaaaaaagaaaaaaagaaaagaaaagaaaaaagaaaatgcagaggggatgtcaggactccctttgaagtggataattggtactactcagtggggttcatggaaaccaaggtggttcatctctggggactagcaagaaaaccaatgtttattggaaaagtggctttggccacatgtttcttctagctattagtaatttgttcctcaaatcaagctagtaagttaaggatctgctttcaacttcttcccgctgaactgcctggcaggcaccccctttttctctggcaagtgatgatttggatgtgcacactcactagaaccagcttccacgggttttgctctgaaccacaccatcacactcctcctgccaacgccaaccataaacgaaattggtcaatggtttcaagccttcttcatcacgcggctcttctgaggctggttccactttcagctgcatggccaggccctcacccgcctctcagaggtcacggagtgttccttctgatgtttgtctctttgaggaagcaactttcaaaggccgggatgcatctctaatgactgtaattgcatttcccatcttctcattagcacaaactgctgtgcacatggaagaaattcagtcagaaacctcaggtctggcctcaggctgcggggtaggcaggtgatctgatcagggcgaagacccagaccagcacgtaggttgccccacatgcccttggcacaggaagaaaagcctctggaacaggtgctatggttgtctttaattctttctcggctttccatggaatgaggaggaggcccagatggtacttccagagccgaggagcagaacccggcccggaggagctaggccggccgtggtttggtcttgaagagaatgaaagcccacccatgttcacagatcgcagagccccagggcgttcaggccacacctgcagctggtgccttgggtgaggctaaggggctcacaagtgcaggcacacatgcccagacgcctgctgggctccaagagtgctggctgctgcccagctacccagaccctccatgtccttccatgccctcagccccaactctcttcctgggggttgtggagggcagggggtgcacagttcactccagaaccttcctaagacccagagctgtagtggggagggttgtgaacaccagtttctgagaccttttcagccaggcggtggttctcgctccacacccttgggggcccctgagcagggaggcctgggtgtgctcacctaacattaccctgtgctttgcagacagacggtgccctatggactgtccaactacagaggaagcttccggggcaagaggtctgcggggccacttccagggaatctgcagctctcacatcggccacacttgcgctgcgcttgtgtggggagatatgacaaggcctgcctgcacttttgcacccaaactctggacgtcagcaggtatgacacctcctccagtttcactcatttgcagatatgcatcaaccctcggcaaggccaggccaggggcttctcaaaggagggtgtaggatagttcagtcacatcctgacctactgtcgtcctgtgggccagagaaaggaggtgctgagcccagaaaagacccaggtcctcagcatcaggagggcaggagatgcagcgtccccacccccttgctgccttttggaacagaagcttcacagtggccgtggctacatctggtttccagacatatgtttttctggcctgcacagcactttgtgaaaatctgaataagttgccaacacttaaaagattgaagaattaacccctgccaaatgcgtatttttagccttctcgaaaatagcccatgataagagtgcaaaaggcttattgggaggggggggaacccagcacgtaggaccatctggtctcagagccccccttctctttggccaccctcagctggaactgagtgggggcatctcacgtttgagtaggatgtgcaatatccatttacctgttaccaatttatcttactttgtagcccctggaggcccccaagtttgagaccctgtggtctgtcctggctgccttagggaagcttgcaaatcacgttgaatggaaccaacaggcagactccatgtttgacccaggggctttgagctggtattcacataacaggtattcctgttaatgctccttactccatctttttcttaacttcgggccaagattcatgaacccagtgaggcagattggccctttcaaaacccttcctggagcaggcgtaggtgagctgccctgatgcacacaaaagacacataggcaggggtgagctcccaacaccccaacaaggcagacggtagcgctcaggaccccaggatctgccgtctgtgaaacccagtgtgaactgcatggtttttccccccttctgggcttttaaacatccgatgaataagtgagtggtgagtatattctgtactttggtagaaatccacccaccgagtgctcagccttcagaaactgtgcctgagacgcagtccttggggaacgcactaatgtgctcattggtggggaagaggaagtcataatttgacaccgaaaaaccagccacagggaaaggcaggttgattgattaaaaccagctctctccccacagtaattcaaggacggcagaaaaaacagacaaagaagaggaagggaaggtgagaggtgccaacagaggcctgtgtcaaaggaggtgaagatgtgacgtgtcattccttcgggggtgggtggagggtgttttgaggggatggcatctggtctggtccagtgggaaccccagatctcatgggatgctgcacccacaagcaatggtgcctttggtggaccgtttctgggggcagagcgggctgaagctgtggacagctgctgtcacttgtcggtccctggccaccctgctctgtgtcctgggagccagcccttgcatcccttgtagctctgggcagtgatgtcctgcctggatttcacctggcctggacaaagctagtcaaccaccgctctcagaggccctgtaggctgctctgcccagacccacacttcgcctctgcttccttagcaacatgtggtctttctcgtcaaaaaaatcatttattcttttcagcagctgattctgggcagaggtgaattacagcagcttgacagcagggtcccttggttctccagttcattgtattattttttttaacccacttgtcttttttgtatgagagatcctgagggtttcctgcagtcaaactgggtttatttgtcattctatcaatcagaagtcattattaatgactccgcagctcatctgcaatgggatggtaatttatgttcataataatagcctggaggtggcttgggtttctacagagactgatcgagggaagatgaaaccatgctcagtatacaggagctttccaaattggtggcagatcgcttctagtctagtccagagagggatctgtcagcaaccataataaaaatggagcgggaggaggagggccgaggcggaagagacagagcccgggagagcatgagtcagacccagatggtcccactttgcctcttcattctttttcctctttttctcttcctcaccccaaaccaaagctcctctcagcgagggcgggatgtaattaaacccatccatccattgcatcatttattcattcgcttatgcattcgttcagcaaagacttgttgggcacctgctacgggctgggcaccattctcgatgctggggacatagcaggaacaaggcataggatctcttttatagagcttaactagtggggatgcagacagcaaacatgtacaatttaaagtgagattgcaaagaataacagaaagacacggcaagggtaggaagcgtggggtggttgcagtttgagatggggttgacgtggcctcatctttctcaccaggtgacctgaaggaaggctgggaggagccatagggatgagtgagggaaagggatttcaggtaggggaaccggtgagtgcaaacgccctagagtgtgctcagggaacggccagaagggagccctatataggagaagcacaccggtccttttgctgttgtggtgattattactgttctatgtcacatgttcaaaagatgcaattggtggtgcagatgtcccagcagggcctggaaaagtggttcttccaggtctctatgagtcatgtaaagctctagtaagaagctttacttgggaagaaaaagtctcttattaagccaatgttcttgctttcttgcaagattcaagttagtaattcccagattcacattctcagagtggaagctgtcaccatccttagcttgtggtaatcaaagatggggccaggctgcgggagggcccctagcagccttgtctgctggtgttattcttttcacacttttccagtctggtggtaggctcggaaattgctgagaagcactgggaagagggtacatacagttccaatcagggaacaggctggagaggcagtgggaagacgttccctttttcagcttcacagaactacagagctacactttcataacatacctttctttttttttcttttgccccctttccccaagacaggttgaagtcaaggaccaacaaagcaagcaggctttagacctccaccatccaaagctcatgcccggcagtggactcgccctcgctccatctacctgcccccgctgcctctttcaggaaggagccccttaggaggacaggcctgcagcatcctggtctcgggaggcttctgtcattgctcacacacagttcagatttccacctctttatagacaagaagtgaatttgcctggggcagaacacccacccaaagagtccccacttaacaataccccccccccacggcaagaatgcccaaatccgaatgaccccagttttcctaatgagtaaaatgatcccagatgtgccccagagcatgacgcctgcagctccggtttcatgcaggaaattggttttggagagttttggcaagttggaaagccacttactggcttttgacatgacttctcttggagaataagtggactccaagctaactctttgcaaatgtaaacacatgtccatcttgtaataaatgcaaaatgcccgtgcagcagaagcatgcgactttcatatccttgcctagaataggctgcatggtgtatgtcagtgagggccacgaggcgtcggctttagacacagatcatagctctacaggagtttatgaatttgaagcttatgggattttggcagagaaattttcagctgtgcttgatacccaccaaaagaatgtatctcgaaagaatgaaggaagaagaaaaaaggatccttgatgtttgtgacaagaaaatgagaaagttagtatctgcaatacagagcttgttcctgttcagtgactgaccctctgtattctgtatagacaccaggccgatacacagtggagttcccaggccttgtttgcaggaagccgactgtaaagacagccccagctcaaggctattaggttgaatatttgctttcatgagtaaatgtggatctttggggaatggcttcaaaataagtcacgaacacaaattctttgtaaattatgtaaattcctgtttatataaattggcaacaacttataccgtctgacagttcaaaatctctttcagctgcgctcttcccaccgagccgagcttactgtgagtgtggagatgttatcccaccatgtaaagtcgcctgcgcaggggagggctgcccatctccccaacccagtcacagagagataggaaacggcatttgagtgggtgtccagggccccgtagagagacatttaagatggtgtatgacagagcattggccttgaccaaatgttaaatcctctgtgtgtatttcataagttattacaggtataaaagtgatgacctatcatgaggaaatgaaagtggctgatttgctggtaggattttgtacagtttagagaagcgattatttattgtgaaactgttctccactccaactcctttatgtggatctgttcaaagtagtcactgtatatacgtatagagaggtagataggtaggtagattttaaattgcattctgaatacaaactcatactccttagagcttgaattacatttttaaaatgcatatgtgctgtttggcaccgtggcaagatggtatcagagagaaacccatcaattgctcaaatactcagaaagtactgtcaaaagcctaataaaaaacctaaagtttgctctga

SEQ ID NO: 400 - DNA, 590123 bp, Homo sapiens
gtaaccggtggaagtgtcaaagaggaaggagtggagggctgctgaggtgacagggtgtggtctgtgagggagcggacgaacccggagaagagagcagagagacccaccaggactaggaggcagcggggagcgtgcctgcgtcgctcggagcggtgacagcaaggagcgcagcgcggaggccgggcggcaaggggagtttccagtcctcgataagtggagtccctgctctgcgctgcgccagcgccttccgcctgggcccgcggtgctagacacctgccgagtccgaagcgggagtcaggctgagccttcggcccccaagtaagtcttcccttttctctccatttctcctccgtcgcctttacttctttatctgcgaagcgaggagctgctgacggaggttctgcgcgaaaagcgcaccggggagctctggcggcgtccaggatgctccagcctcccggcgcgccgcggccggcgcagagacccgaccgcgaggcccgccgcccggttcccgtgcgcagcatggcccgaggcggcggcagagttgttggcactgataagacccgtcttttgtgtcttgcccgatcccggagctgtgccaggccggggggagggagcggaagccactttatggctcgtggccccacctcttgcccccaccccaaatcctccgggatttcaaaatgccgcggactcgggcgcaagtgagcgccaaacccgcaagctgggcgagttggatccgggtcggcagccggctgaaccgccacgctgccccgctttttttattttctttttagatacggcatctaattggtgggtgctgggaggcagggctggttgggtgagcacgagtacctgggtgtagggaacgacctaccttcttgctttccttggggtttagaggggaaggggtgggggcacccagagccccgaagcccggagcgtcccgcgctagcgggcttgcgcgcggccggcgagcaggcgttctctgggtgggtcccttgtctggctcattgttcgcggtgactgttcttggggccaggctgagcgacacagacaccgctcaccgggctgtaaataaaagtgacgacttggaggagtgggggtcaaggctgccgggagggaaaaggcttgcccattttagaaaccgacttggagctcggaagagcaaacgtagtcgacagagaaaaccgctcctgagtgcgaaacttagatctgactctaattcacagagacagcctagtaaattaaaccctcaggaacagggcacggtatttcccccattgaaattgttttcagagtaacgaagatggagttttaagtgttattgacagctggccgctttctcttgctagcacctgtttcccttaaagattcctgggtggggtttattttttcgccccctccctcctttttttagaatgtgcatttattccatttgtgccttcagctagtcgagttgcatggtgctgggaggagaatccatttttgaaagcaaagtgcaatttccactctacaaatggccaagcactggtgtagacgtccattgctcccccaccctggccgcatgctaacattcatggaggcagacatgtgtacccagaatcagagggagccggttatcctcagttggagatcccaaaagacttctgcatacagttcctttcgttggatggtagatactcttatttgactttcttccattctttaaattacaatggtatcacctgttcatggtgcctattccttagcccactacaaaggaggatgcattttgctgggaaaaaaatgctctttctttttctgaggtccgtgggtagtattcagaataagctcttgacaagagaaattattaaattattatgatttcttatatatgtgtgtatatataaatatatatgtacaagtttacaatattgtctacaaatatacaatatttgtgtatatatatgtgtatatatgtatgtatgtgtgcatgtatatatatgtgtgtgcatatatatatacacatatatagtatttgtagctggttgtaaatcccagtagttactaatgcacccaactgacctggttatatttcactttgacatccctgatggacctgctaagtgtatcaatctgatgaagcctggagttccagccctcaggagaagtacttaacatgaacacctctctatgacggcagtctgattccacagggaaaaaccatgtagtgggagtgttgttgagggtatggaaagctgtatgatttattccaaggagagaagagagagttaggtagaagaaaataaaaatggaaactgggtaggcatccagaccatactcacggttcgacaaatatgtatgtggaaaagtgtatttattgtgttctctctctctcttttatcataatgtttataaccttaatgctttcatagcagcattcgtacctcttttttttttttgcttaaaaactattatattttcaactctattattttacattttcaatgccgttcgtgcccactgaatgcattggattatcttttcaattgttcttttgtctacttgtataccatgtccaacttagtacaggaccacatgaacaatgaatcaaccaggttctaatgaagattaagacatgaagagtattcacagctatgtataaactgtatactcatttaaccatcttcccacatgaccaattttagctagtagcttgttcatcttctgaagtctccagactccaaattcttacccagattgattactgcactaaatcttgattgtgcaaagaacagaacttaattattttggtctcatttgtcagtcagcagtatttagtgttgccaagataattatatcattgaagtatgcatgactttaaaatatgttgaaaaaggtctttctaaacttgttcataaagaaaaaaaaaagtccttgtgaagccataatttcactgctgtaggcctcctggccattcgcgtttattgagtttactcttccacatgaagaatgaaccattgttttgttgtctaggaactgaaggaagatggaaagggggcatagaaaatgaagcacttgtaaatgttattattttctgtatttggaaaataaatatttttaagtaaataacgattatcttcttaaagatacactaaaaccttattaagagatctgagaaaaaaagaattttcaaaatagaaatgctagctgcttctaaatattcataaaaggttggtgtttacaaacacatatatttttgaaccaatctcaagatttttatgtctttctatggaattatgaagtgttattcaattattattaaaacattgaaatctcatcaaaacttatatttaaacgtactgtctttttgcaagtgctttaattgtaatagcctgtttgttgagattaaaaagaacatcattgatgtcatggtgtgctttgcattttaaaatagtggctaatgaattacaaacattcattactcaacaactacttgctgaaatttctcaggacccccaaatagagatttatttgtactatatactatcattcatgcccttgctgagtttatgttgataccctttttcttcttcaaaattaattgccttttaaattaatactatgttgggtctgactcttttgttatttttctcctatgtcataaatttatgtgcaaatatcttcagcattgtctggttagagaacttactgttgaaaacgtgggaattagtggggggaggggtgaagagagaagaacaacttttattaaacctggagtcaggacttaagacaggaaaagaagggcaagtttcatttaataaaattcactgaggaatttgtctttgacctttaaaagtccgagctgtgtagtacataatatacatttgggtaaatcaggcactaacttcataaagcataaggcaaaataagagagtttcatggtgtctttgctttgctacatttgaatggtggctttaattccactcacttttttatttttgggggatgctgttctatttatgtaaaaatggatatcgtcaatgtttattttgggaacattttattttaaaagcttagtttcttctatgagtttagctcttattaaatgtttactaagaaagatgatgtttgattcagttttcataactaaatgcaactagaaacacattgattaagtgattcaaataagcccatttaaatactaaatttagtcttctctttcacaagctattgtgaagaaaatgctttgaattagatttttattttaataaccaatattcatttatatttcctgtaacgtgaagactaacattaatgggtaataaaaatgaaacatttgtgaaatgaggagatataaggcaatgcaaattaatgattgtgtgtactcttgatacctagctttttttctgataaattagtatttttaatctcaggggtaatgtagatttcttaactgattacattttctttttgctttaggcacaagaaagctcagagcccatgggagatttaatttattatcatataagactccttggaatgaatatatgtgttatctttccaaatgaccttactttattctacttatgtatacaatttctctgtcataatgtcttattttgtttttctttttcaattgtggaagaaggcagatcatcaaagttgttatgaataagtgtttagaagtacaatcaagcctgcaagtagttattaaggtctaatattgcaaatgctgaggtgacatgagacaaaggaggcaagatttctgatctaaagatacttgtattctggctgggtggagaagccataaactcctaaggaattagctcaaagtaagtcaacatgtgcatacatctgttgcaccaaaatgaaagcccaaccctgactttaatgacattcagtttctagaaaaacactattatagcaccaatcagaaaagccaagtaactaaatcttttaattttctgggcacactaagacttaagtagtctgaggatatcagggtggaaataaatgtagaaaaagttattgtgattccatggtagtggaaactcccatacacttctctttccctttctctttctcttttcctctcttctctttcttgattcctctgtctctctatcattggctttccccttgctaccctggcagacctgattgacaggtgtgacaattcccatggcaagctaatcccaccaggctggcagcttttgaaatttctatgtaaatacagtatttgttctaagtaccacacttaaatacagtagttaacgtttaagcacccacaggttgtttctctttgtacttgaatcaacaaccattttcagctcttagaagggaccacccacaaaactgtactttttgactgtagaaaaactcagggagaaacaaataaaatgaagcaaaaagttgagagaaaaaaaaccccaaaaaccacaaaactaaattatcgctaaattatcgacccaaggaggcatggttaggctaaggccaaaaactctgaattaaacttccaaatctaaccagctacctctagatgtaaacctgattttcatcttttctatcacccacatagacatgacttttttttccagacatcttgattacagttaatgttaaaatagcttcaagtctaaaatgcagatgtgttgtcttgaactgaaacgaactatcaaacagacaatgataaataatgatcatttaaacttggccttttaaaaagcacattggatacaataaaaatcagtgtattagtacactaaatgtgcttccaattatgatataaatagtgcataaagctttaaaattttcatcaaattaatgtatcactgacatgcaaattaactactgacatctatggtgtatgccatgtgatgatttctaattggcaagtgaacctcagaggattatttatagattacactgcaacaaagtgctggagtaaattcgcattgtgcagctcaattcaaattggtgtttgagctttgattctcttcactttttcacaccccttttgatctccaaaggctctcagaaataagctagctaaggtgctaaatatctaattaataacatttgggcagagaatttgtcttcaaatgacccctaagagatttggagaccagttaatatccctcactagcttgttcaggtatgaataactcttgaggctgttgagtttgaactccaagatttggtaacatccatttccatccaaagcacgtaagagaaatgttcacacaggaaaagtgaggaggaaacttgaaaatttaccaagtgtattaatttttaagaacagctgcttctaaggatctaagtggaaatcctgtattattctctaatggcaattgaggcttcttttatctttactttccattacaatttgtgtatgaagaatgcagtgagagaattacaatgtatctgcaattcccatactatgttattagctccaagtttggcctttctttattccatgtccgtgtctccctaaaggtagaatgaccaaataaaaaatgaagaagtaagtccatttattctgaacagtttcatttattatgtgttttatacatgacctcatgaggcaaagatacattagtgtaaattcctgcttacaaagatctaacttattaaataactttttaatgtattaaccttttcaatattttcttcatactatatccatcctggaatgtacaacttagcctgccaagttggttaaatgtctatcttttcttaaagattgttaaaaagaaactctctttttgaaggaatctccatagctgggtttaaacttgacatccttgattgggtgaggtggctcatacctgtaatcgcagaactttgggaggctgagatgagaggactgtttgagcccaggagttccaaaccagctgtggcaacattcggagaccctgtctctataaatgataatagtaataatagccgggtgcagtcatacacgcctgtactccccacaagtggagaggctgaagtgggaggaactctctaggcctgggagcttgaggctgcagagagccgtgattgtgccactgcactctagcctgagcaacagagtgataccctgtctcaaaacatatatatatatatatatacttgatattctttttgtaagagcttgtgtttgtggtgtgttttatagtttatattgaaatcatgaaaatatttagacaatctaaaaaatatatacaaatacagtatttattataagtattactatcatcctaaagctgaggagataaactaaatattggatacaagcaacacatggaagtgaatactagcgttatttttaacacttttgaataatttgttcttaggcctgttaccttttatggaaaggtgccttcactagtaatgaggccatggcgtgggtatgatcaaggcaacttgacttcttgctgataaaggtttataaggaaatttatcttttgattaggaaacctcacttaatttcattaataaacattgaatgaggacttaccgtgtcccaggtattgaaataagaaatgactattaaaaagaaatgaaaaggtccctgctctgaaggtatttagaatacaatgaaaaattaaatgtatcaaataaatgtgtagatgaaatcatacatattacaggatgttgggggagctataatgaagggtgtatgtctcaatttaggagatggtatagaaaagcttaatgggagaattgaagctaaaagtcaggtataaatttttcaggtgacgaagcagtagatagtagtctctgttatagagttgctggagagaaggcagaaaagtgaggcacagatggagaatcaagaaagtcgagcaggaagtatacattagaccaaggttatcatagcactctggaccagagatgaagatttagaagtgtaatcctgaatccaacgttcttatactttgcctacatccatgaagctgaacatatctaagggaaatacacaaccatggtgtcatttcgtactcattaatcttaagtatgttcttaaggttatcaggtgatcttactgtgcttcctgagtctatatgatactttctcctctctccttaaacactcagtgcctctgtctacaccctcactctcagatgaaggccatgcttcctattcactgataaaatggagaacatcagaaaggaacttccattgacactcactgccacatctatccatctaccagcacctgctcccacataatctacctcctttcaagttttctcacagagccctggtggaatttcaacagttgtatcttagtagaatgcaatgtagaaatgggtaaatgcaatttgccaatgaaaaagactattcccttagacctagaacttctatttttatttatttaaccttaggaaataatctgggtttcagtcaaaaatttatataaaggaagtttctttgaatactgtaaaattagaaacaatacatctgcccaaagatgggaaaaaagcatgtttatcatcattaaaaagcatttttttcaaagaataactattgataaggtaaaaatgaatgatatagtgtaaaaagaaaaataaaacaatactgtacagagtatatcttacaatgttatgattgtacatagaaatgaccagaaaaatgaacatgttaaaaggctgccctatcagatattgaaatggaaattgttctgtgtagcaaatctattgaagatatactcatcttggaagagacaacttgatgggaagattctggccacacagaaaatgtctactgaatagagacaatagaaaaatcacaatagagaaaaacgttgtcctgtttccagcaggcatttctcttacctagtatatccaatccaccaaatttcatagaattaactgctaaaagacatgacaaattaacttaattcttgctatctccactgctatccttctggtctgagaaaccatcattttgggcctggatcattgccttatctcccagcagtttcctctcacgcttgcccttgcagaaacaaagatctgagaggccatattgcatggtgtttgaagcatggaccccatggatgggctgcctgagtacaagtcccagagctttcccttaatagctgtgagacttggggcaggttacttctcttccattttctcatcaataaaattgacaatattaatacatatcttataaggttgttatgaggatcaaatgagtatccctaatatgaaaatacaaaatacgaaatgctccaagatctgcaactttttgagcacagacatgacactcacaggaaatgctaattggagcattttggatttcagattttcagattagggatgctgaacttgtaagtctactgcaaatattcccaaatcaccacaaaaagatctaaaatctgaaacacttgtaatctcaagaataaggaatactgaaccttatgttttagctgtttgtcaaggccgaaattggattatactcttctctgcttaaaaccatccaaaggcttctcattacactttgaatggaatccttgtagtcacatacatcaacttcaattctcaccactctctgcttccttggtatttctatgaaaaacaaaaacaaaaacaaaacaaaaaaactcttgttctgtcacagggcctttgtgcatgctgttcccttcatctgggacacttttattgactcttcatagcttcttcctgcccttcatgtctctagctctgccttctccttgaaaagcctgtctgtgacttctattaatctgcagaatatctcttactctttttattcactctttattccttattgtctctttaatagaccttatctcaatttgagcttttcttttgtttggttaactcttttcccctctatttcatgactagattttaaattctgtgaaacaaggataatgtctgttgtgattacatttgttcccttaatacttaacagagagtacagcatatggtagacaactaaataaatattgggtgagtgggtaggtggatggatggatgggtggatgggtggatgggtggatggatggatgggtggatgggtggatgggtggatggatgataggtttggttggctggctgagattcttactattaagatcatggaattgtatttctgagagaagctaacttaatatttacaaggtcaaatatatatgtcatatatgtgtcactaaggagatacagaaggttaagttattaacactccttatcatttacttctggtacctaatgtcttaaaaatgcttgtcaaaacaccggtgcattttgaaagagttagagagtttgagagggagagtggggaggtaagtggactgggggactctagacttgaagatacttcaggccaggacagacctatgggaaattgcgtgtgggggctagggagtgggcagggttgaggtggaagtattaaggtgttggtagtccaggcattcaagaggaagtatcagatcagcatttcacaaagaaccaggtcaaaaatactacataaagtaacttcttcttagctttagagaatgttcagtagggccttgcacacatagtaccaaaatatgtgaatgaaatatttgtctaggaaattacagttacctgatgtcatgacataaaaacaaaactgttttctttctttgactcagccagtttttaaaatggtagtcagtcaactggagtatgtacatatgtgagtgtatctatctttacagacaaactttttgttccacctaggaagatacttcatatggaagatgttttcatgtactgctttttatcataaaagtataaaggcctggaaagttttgtgttgaatgatgttctctttgtcttaccaggaggtgtcactacagctcactcaaacttaactagtgcattctatagggatcaaccggtgtcagcacttaccagaatagcattacctgcctactaagttttccaccaagttacgtaaaggaaatttgatgaaaaaaagaatcatttccagatgcctatttctcctccatacaaatattcttatcattaattacctgaaacttaaaaacttgtttaatattctagaaacaaatggcatttttactttcccttgagtgttaagtggggacagtggagaaaaaaagagcagaataaaaagaggaaagatggacacagagaaacatgaaaagaagggtgaaacagaagtgtttccagtgacaatgtgctgtgtgaagaccccagagcacattgctttctcacctgtcttacttgggctgcatcatccgttccctgccctttatctctgcccagataagtctaactttctctgccagagctgggataattagaacaaaaatgattatctggtgttgagctaatatactatcacagctctttgacatatataattttctatctcccctgataacattataagataggtattaatacaaaaattttccaggggaagaaaatgaaaatcagaaagtttgcatgatttgtggttataattgtgtattttaccatggtcttaccagatgtcaaaaccacactcttgttcttttcatgatgcctctaaaggatcactctcacgggagactttcctaatgtcctttaacccctgaccctgaccaatttaggtatctcttctcggggttccactgcatcttgtgctcgccgtgtttgaacatttatcatgaatgagcacagccttctattctcttgtctacctcttcatccagagtctgagcactttgagggtggacacgatgtcttgttgaaagaacagaatgtgagacccccattaactggatgggtgagtaagaggaaaggctcacctacagatggggattcaacgtgggtgagcgtgtggatgaaggacagcagagaaagcaaggccccccaggccacctgccttcacccaccaccactggcctcaggtgctccacagcaagttatcaatgaaggggaaagtttcagatttttttttttttggagacgtgagaacagggttaaccacccaagaagcaggtgatattcatccagcatagcccacacgttgtaggtccactaggactggagggaagtaactggcatctgaggagctatgtgttctgctgtcctccaggtggcagcatggcccagctgttggagacaagctcagttcttggacatccctaatgctgccagactcagaactgttctcaaggcgtttagtgccctgggaatgattaatggctctgcccgttcactgcacccggagggtaattgagcctgcagtattttggaggctgcagagaggctttctgagccactgtctgatagaaggggctgcaacattttggatattatatcccttgggagacctcctggaggacatttgtgtgccaaaagagatctttggtagaactctttaaagaggaaaaaagacagcccccctaaaatatggggaaattgagcagttttaacgttttttcagaaatttggtttgctgtatgttccatattcttttttccttctttggttctgaaataatattcctttccacctgacttaaagcaaatcctttggaaggtagcttatgttaattgactgagtattttgaaagcatgcaggcagagctatgtaaaatgtcttaatttaaatcagcgctaagccctttcatattgtaagctgaggtatttaaaagtaagatgattggaaatttctaaagttgcacacgattcaagagaatgcgaaacatgttagaaagagctactggcacgaggctacagcatccatttattctcaatatacacataatatcaattatagaagacaaccaacaaaagatcttaagcttgtcaggttgggtttgtgtggctgcttctgttcattagaattttgagtaactgggaaaactaccagattcttaatggtttcttgaacaggatatactaggagatcttagcactgttaagaaaaaaaatcacatataaattcaaaaaacctttgctcatctatgtggccaaatggggaatctaaccctccccctttctgtagtttggatttaagtacctgtggtggtggttttttagcttcttctgtggattcattaatatcactttggtactttcaagaacagttgttcttccctaacctgtgagattttactctccattatagaagagtctctcctcctagcctgtgatgatttgatgctgtaccctgtatacgaggttatcttccagatgtttagagagccaaacttaactggttctctgtgtgccaacacttttaagttttcacaggcagtgagtttaaggtctttaaatcattggaatagagtagaaaatcagaagaacaattaggatggcccctcaaattctgtttttaaattaggttacagatgtgcatagactgctcttctatcttgccttgctttgttaaatttatctcaaagattgaacttgcaagtgtctttttttttttttgtaatgaagacctaagctaaagattgaaagaaaggagtggagagggggaattaattgaaataaatccacaatagttcattcatagcctctaatttaactaccacaacaaaattagtgggaaaaaaaaatcctagcattaagtcttgtttgatgattcttgactcactgaagggcttttctcagcctaccagtttctttggctgttttggataatttatcagaaatgtcttgaaatgacctcttgatatggagatctgtattcccatgccgtcattaattattgcactgtttaatatatacacactatggagtactctaagtattattgtttatatttcttattttttttactaatttttcaaaatacaaatttctttctgtgtcatatttgtaaactaataataatttttggatatatttaaatcatttccttggggagtcaaaaggcttactgtcctagaaaaggacagagttggtattacctgacacatgtaacataatgccctccaacttcatctgagttgttgcaaattacagattttccttatttttttgtggctgaatggtactccattgtgtatatacctcatgatctcactcacacgtggaatgtaaaaaattgatctcatagatgtggagagtaggatggtggttaccaggggttggtgcagagggtgggaagatcttggtcaaaggatataaaatttcagttagacaggaggaataggttcaagaaatccattgtacaaatggtgacgatagttaatatactgaattcttgaaaattgctgtgggcggattttgtgttctcactacaaaatatgacaactctgtgaggtaatgcatatgttgattggcttgattataccattcaaagtatgtatttttcaggatttgatattgtgcaatataaatatatacaattttatctgtcaattaaaaaaataagatatggatcccattgtgtctaggatcatgttgattcctaaagacagagctctaaggaagtggattaggtgaaaacaataacagcttggcctcctcctctgcttagaagggctcctgtgttgtgtaactcccaagtgaatctttcacaccaagggtggtccaagcagggacctggattcacacttgcaattggatgagatttttttttctcttttctttggggaggataacggttaattagtaagcaagagaaccaggattcaaatttaactttttctaaacccaaagcccaaaattttcattctgcttccttgacaccaatatttttgacaaactgtttgtagcaaaggatcacaaaattatacagtgacaggagggaggacacgtatacgtcaatatgtttttgtgcttctctgaaacacctaagggaagagatttcaatgggtacagtttggagtcctttcctgggaaggaacttcccttaaaaagcatcattctgaggactaaacaggaaaaagatgtggaagagaaaaacattgacaactactttacacttttcccctattggttttgcctttgtgcctcagcatcagcagtaagtaattgggctttaagatcattaaaagtttctgtatgtaagtccacttgtttgtttgtttatctgtttttatctcattatttctagtctttccacaaaatatttcaggaagcaaatgtgttaggatagttaaatagacctattggctaatgaagaggtttatattaaggtgcagaagaaagttatgaaaacagatggtttcagctgctctcattaccagccatgaattacaccacctggagaactgcaattcctgtgaattcacaatacatttccagcaaagtgttttgctgagtagtcttgctgggtggagtaggttttgtagttgagtaaggcaaaggtataagcaagccacttagagctctgtactctaggaagagtgtgtgtctcccctacaaaagcagaaaataaaaacattcctgttttacttggaatatgttttagaacaaatatttaaatatctaagtggatatgtacatgggtccttgtgtatgtgtgtgatatttctgcaattccttccaaaaaaatgatgtagtcccattgtgaaaacctaactacagaagagctagaaatttatttattccatcttgacctgtgctcaacttttccatgataaaacactcctcaaaccttcctttgcaagaaaacttgctaaactaaaatatatctctcctctctcctgccttctcagtaccaaagtgtaggatttattctagagtattttgtgtatatgtgtgtgtgtgtgaactgagatgtctaataatacaaataaatggcatttaccaaattcatactgtgcattttgcagtgagctaggttagctagttacatacgttatttcatttagttctcattatgaaagttactattattaatactgtttgacagatttaaaaaaacagaatctttgagaggccaagtagcatgcctagatttcagccagttgcggtagaactgaggtcatcctcagagaacacacttttatgatgtatatctatgtgtctttgtctatatactccatatcactacgttctgctcaaaccaaaagcaagattactcaacaaaggaacactgaagattatctgtgtacttaagttgccctgaaataagggaaagggcgaaagggctgtggaaatcacaagactccagttttgatttagctccccttgcttcctcaatctgtgagtatctgatgtgctgatcttattagcttgttgggaagaagaccaactatatttgtgaaaagtgttacaagactataaaggactaggaaacaaggtacaactaatcagataaacaaatttaagtggtacctgtttgagggagagttggcaacccttctctggggtcagaaaattatattttataaaattcacatatctgttgggaacaaaatatgtactcaaaagcataaaataagcctggaataaattcacagtgccacttttaattataattcttaggattttagtcaatgttaattattactgttttattctagtgaattactaaaataaagaaatattaattatgcgctattctaaccagctttaaatttatgtagtaaagtcattaaaagtttctatctggtattagcataaaagtacacatacaattccactattttactaaggctgacattttgaggttgagttacaactgcagggcagttttcaaaaaattgccctacaaacatcatatgaatacattttacacatttataggtagaaaaagaaagatatttccaaaagttaacctagaatgctgccccagcatttgctggtttctatgcttgacaaaatcattcttcattgatttagaaaaagttaccaaaacaatatgatgactgaatgatttcttgtttcaccagagctgcgtggtttctttgagtgtgctttaagagagagggagaagccagggtgggcatgaagagccagtatgtaagctgtattcaaggtggtctctgtctttttagagctaagggaaactgtcttttgccttgtcttattcatcgatttagtagaaagcttgtgtgtgttttatattttggaatattcagtcttttagatttacttccaaataatttatttctacattatgcttctttgtttgtagagaacaatacttacacaagtgttttatgaagtaaaatgaaccaacactacactctacaaagggaatttcaaaataaaaaccattacggatgaatggcatacattacagacatctctaccatatgtcttaatgggtctgttgtactgagcccatttacaaaattcataggcctaatttatctaagaaatagagcgataatgctttcaagacaaggaaagaaatagaaatgtggtaaatataaaagacacattaataatttttcctatgaccctgatttctgtcttttcttttaaattattcagagtcatatcagaaggatagttttaataatacagacattattcaatatcagtagaagtttggcaacattacttcctagagtaggtggttttgagacagagtagggacagggcttggcttcacccccactagaggattcttttatgcagtcccacagatcacaaaacctataccactacctcactgaagccgtaatgtttaaccataccttttacttaattccagaaactggccttaagagatccaaatattaaaccaagattgtggagtgtcccacctcaggaaggaatgctggacaattgatttacagcctgttgctgttggtcagaccaccagttggtctcttattcaagataatttctataccctactcctcacatactttgcccagcccagacggcatgccttattcctgatgtcagttcccacactttgcctaataaaaaacctctgctggcttttttggggggtcagctggaggatccttgagcttatgctgccttccttatgcttgagcacaagccccaaaataaaagctttgtttgggaaattgcttggcctcatgttaatgttcattacatggggagccacaagcctgtggtctgtaacagattcagaggatgggagaacttccgatatcattatgttacagtaggtagctaatcaggaatgagcaggtcaggagagggcctccctgaccccatcaggaatgttaggcgaccatcaggtgattgtcgggaagttgttacactgcgtctctaaaataataattggtcacagccagtccctgagaaaggcggtctcccaataaatagatacaactgaaacgggtgatcaacagcttcctgataagatctcaggagttgggcgggtggcctcaagcagacacattaagaggcaaaatggcagagtttaactggtgtatggccttccagggacattcgattggtaagggaagaatgcctcaagtgagcatgtgtacaactccagtagacacactgtacatgctcacctcccaagcactagcaggccactgcacatatggacaccacgcctcctcccaaggaaagaatcaggggagaagagatgcaagaccctggaagtatgtcaacatataaaaccccaagtcaaacggtcaaaccatgcacttgatctctcaagtcaccttcgtggccctcttccaagtatactttacttcctttcattcctgttctaaagctttttagtaaactcactcctgctctaaaacttgccgcagtttctctttctgccttacgcccctcaattgaatttgtttcttctgagaaggcaagaattgaggttgcttcagacccttacagatttttagctggtaacaattacacttctaagagcgaaaaaatgtggacaaagtgtaggaaattctgtaatgaaggaatttctgggatgtagactctatccaccatggtgtataaaatatgtctgagagatatctctctccaacaacatctctttctttccttttagtgaaaacaaagaaggcaaaatatttatataattagatccttaattgttttttaaaaagttattttcaaaaggagtctgaactgttgtttgttcagcttccttttctggacctgcctgtttgaactgactcagttgataccacctttcactattaaaagttttgggactcagaaggcaatacccccaaactggcactttgacatgttgagaggtcttagaagctgcctcagaatcaagttccctctaaccttgttctattcccccacccccaattgcatggagggactctttctggaatttcttatctgactaagaaagcttctttccaaaagaaaggcaattgtcttaagatcctctccctaggaatctcatcaaatagctaggaaagatcaatcactggaaaagagaagagactggaagtccatcaccacacccacgcagatttttcatctgttcttctgagggcagctctgagagattgtctaggagactttatatgtctaagaacaagacaacctttaacctttgttcctgtgcctttccacccttacaggccaatccattcccccattttcctcttccctatgaagaggtcatttaagcttcaaccatctggcccatctttgagctcatactttataggactcccatgctcatgtgtgtatgtaaaacatttgttatgcttttctctaggtaacctgtttttgtaataagagtgtcaaccttgaccctttatgatagggaggaaaaggatcatcaccttctttctgcccctgcaaaaggaaaatactttgggcatgttaagagttattgaatgaatctaattgttttgtggacatgaaaatccacacattcctatttgtttatttaatttaagagactgaaaatattataaatcagtgctgtgtaccagtatgtttacatagaagttaattattttaaacagaaaatatccatggcatagataatacaaaataatttgacaataaaatatctagcagtaaccataagctattaattacaaacctcctttgacttgagaagagagtggtggacactggactgctggaactcagagcaactgtagagaaggaagagtcgaattattacaacaattcagtttctattcttataggtggccattcaaggtgatttgtgaggaactatcactctggctacagttcaatgaccatcctaagctattcaaaagcattgaagccaaattcaatgaaaaatttaacctcctgtggtgctcttgtcttccaaatacagtatcaacagagacttggtacttttccactgtgaggtacataaatgtcttctgtctcaaaaaataaataaaaaggtaaattctctcactatggactattcagtttgtgtggaagatcattaatgagacactgtaaaatctgtggccagaggttactgtttacagtaaaattgaggttatatcttcataatatttcattaagttaatcactgtggaaagggtgactgtttaataacgaccatgtttaatcacctggtcagttgaggtctggattgaattgacagatttgactacttatttataggttttggacctttctctggagttaggacactaggataatgcaatatagaatcaaaggggagtttagagattagctagatagaaatctcaactctcacctgtcagctctgtgaccttggttatataacatctctgataaattatagaacttctataatagacggagatcaagcagatcatatatgaattaaatgaaataatatatgtaaatcatctatcatgtacagcatattttaagtgctcaatcaatgatgtttatggttgtttttagggaggattataattggagaaaggttaaacttgttaaagtatgggcctatgtagaatttttcaggtaaagggatttgaacccaaaaaagttagtagaaaaccttggggggagaagggaaagaagctgtaaaaatgtcagatttatttagcacctactatgctttggacactgtagtaggcatgtggttgaagagaaagctatataagaggacataagaacatcaaaattaatatttacctgattatagttcttcccaattcctttgcaaaactttctgcctctgaaaagaatctgagttgcaatttaaaagttgtttgctaatttgtggcctggattacaaaaccagttccaatcattgtagatacctagtatattttgttgaaagtatgctactaaggaaaaataatgaactatttattgtcttctcctttttgctcttatgaattttgaaaatttgatgtgattaacagtttccacatgtgtccttctatatatttctttctttgagaaagtgaacccttgaaggtgtacttcgtatagcgagggtctaacatattgtcattacatagttgtgcatggtgacaaatttggaattaatcaatgagtgagtgagagtcagttaaataagtaaaccttcaggttaagatcagtggtttagtgagcagggtcaaaagcatatttgccagacacatcaatgtcactctgccaagttctgaaatgcataaaatattatattataaaaatgattactatcaaatatagggaggttctggtaaaaaatgctgtgtacattatttgctgatggcattataaattgagaagccctttagaaagccacagatatatttatatgcatggcattatatattcttttatgaaaacattcgaatagaccataataagctaaaaattaaaaatattttattttaatcaatattaatagcaaaaagttagagatacaagtccagcaaagtaattattttatgttatagtttatcagcaaatatactgcaacaatataaatatagcatgcatgcataggtcatatgcataaataaaaatagtagttggataagtgacttttgcatttgaacaacatttatttattttgcctttcagttacacttctaaaattatcccattttaatgtcatcaatagataatgtagacacaactgtaccttttcttctgataattcagtatctttaaaggctcttcattagtttccttcatttcaacatccttacactaaaattttggaatacatggatgactgggttaagtgggtatgatattattaacctcaagccacatgccttgaaggttgttttaacaaataaatatccaatatgtattaatgttcatatatagttccttttacttactgaaaatcaatataaggtaaaaagtcaaaggccaacatgtatatgtgtcttttttggcatgcatatggaatctgttggcagcacaatataatgaaaaagaactcatggccaacaggttggtcgtgttgattttacagatgagagaaccctgggagacagagaaatgaagtggtttggacagggttacaataccagttgaaggcagagccaggattagcatttacaggttctgagtaagttcaaaacttttttattcaccccttaggcagaatgcttttcccatcaccctgaaatgaactatcagcttccttccagcctcagagcccgtgaagatttttctctacctgcagcgtcgcatttgcactacatttccatgtctaaggaaaacagtagcttccatcctagccagcagttactatgttgtgcacaattacgcagacataataaatgcatggttctcgggtggtcatgtgtgcatgttctgattggctgcatcttctcaaaatcaggaattctgctcctcagctctacagtatgaatgtgttcacttagccaacggcattcctatctgtcacaacagcattcctgcagccctctccccaccatccacaggccgaaatcctggtcacagcaagctgctcccactggggtagcttccaaaaaccaacaaaagcaaattagtgttcctggtttgcttcagaaacaaacagcaaagaagcctctccaaaaatgccttaaaaaacaaataagagagagaaaaaataacttcaagggaaaacctaccactactcatgaaggaggctccaggagaaaacttcaaaaaagataaatggttgctgaggactgtttgcccattagcctgtggtgggcaattaggcagcagtggaagagagaaggaatggctcaattcacttgagggtcctagggagccagccttgaaagaattttaaaaagaatacagtcacttgatttaattaatatgatgaaatgaacattgattatatttaatctctccattgacttgcagttttcccatcatttatacatggcttcctcctttgctccatttgtgcttgaccttcttatttcctcctctgtgccactatggtaaagaagccctcctgctatatctcccatttacaatgcggtgagagaatttctgggttttaaaaaatcatgagggcagtaggcaattgtcagtcagaaaactcttctgagtctctttggaaaaccattattttattacccttttccaataatactgacctagaaacctagacagtaaatattaactgagaacctatttatgaatcaggcacaagtctagccatcatgggaggtccaagtctaagtagtgctttgtccttgtgctcaagaatttcatggtttgagaagaggatgtgaagatttgctggtaaggttccaatttagcaaatctgcctggctaccctatttgtctttcctcctcttctggctccttgcacctaggccatatttttcatgaaaaaggcagtcctctaagagaaaagggctctaaattgtggctcccaaacatgggtccttggagcagtacctccagaataaccactgtgctttctgaaactacttcatctagtacgagatcagagtaccctggggagaggactaagatgtccattttacagatgccttctagggaattctggtacttcaccaggttgggaaatcaacatcagaggtaccaataatggacaggagggagtgactgtggaaacaggtacagtagccactggcgcgcgcgcacacacacacacacacacacacacacacacacacacacacacacacacacacacactactgtaacggttaaagactttcagctgtggagtcagattacccaggtttaaatcctgtctctgccacttagagctgtgagatttggggcttgttttaaaaccaactggtctttagtttccacattttttttaaatgagaaaaataatatgacccacctcatgggattattatactgattaaattagttaacgtattaaaaccatttagaatggtgctagagatacagaaaataccgaataagtattacctatctttattatcactataataaggaagtttatgcttagagtcttaggaaaatacaggtgagatatatcttctctatttagtcctctatattaaataaagcattaaaaacctgctgatacaagagaccttctaaatactaggtgatttttgaatcgtgtttcagaagaggcttgtaggctgttttgtgttttctgtgttcagcagatggtagtaactagccactaccctcatcattacactatactgctatacattctattgctttccatttcttcaatataaagatctcaggaacaatgaaaattataaagcatagaagaacattaaacagtttttaaatcccattaattgtccatttctcatcatggtcttaagtgagccccaaagtaataatgttcaattatatttgagtcaatcaaaaatattaatatttcttcttatcattgggcagaagttggtattctcattccaggacggtttctgactaccagattggtcttgggcatgtcctataacatctttgggcttagtattttcactgataaataagattgggttgacctcttgggataactagagtccctcatactgcctgtggtttctttcactctgctgtttgtccaaatgtgagtaacaataaaggaagaattttcactaataagaaggagtccagtttcaggatgtcagctggaccacatgcatagcttgtagatctctcctttttactctttgagatattctttgttttctgcaatagctagacccaaggccattccattatttctaataggtaggataatctcatgtttcaaaagtatcaactatatatagtatagttcaataaaataatacatggggaataaaatattcaataaaatattagtacatggggaaatatttccatgataataaaagattgagacatgccatgttaaatttaaactggttctttttttatctacttagaatctgcaacacgtgaatgtacactgaattaccaataagagaatatagtataaaatgcttccaaaatattttggtcatggaaccctaactttcaagaaatattccatgggatcaacatttcaaagagtacagttttgcaaatgctagaggagttttgaccatttttgactttctaaacaagtatcaaccatccaataatccagttttctacctgaagttcagtgaaaagtaatgcccaaagaatcatttatcaaaaatggcagattgaaaaactttatattaatttattcactgctacgctgtaacatattccactgtttcagttcagagatctcaagagtaatgtaaattttctgaatatttcatttaagaatgtatacaaatgtcagatgtgaggaagaaatcttaagctgaaatcattccctggtccccgtcgcctctccaggtctgctgtgttgatcctcagcaatgctcgtatgccaaacaaggcttaacttccttgtttctaaggaagtttctcaaatgttgccaatcctaacttagtctttatgtataaaaaggaaaatattgaaattcttatgaatgcttttgattcattgggccaaaggagcaattgccaagggcctatcaagcccttaaagtggaatgaccagcagttcttgtaccagtgtgaatgttaggtttttgtcctaaataaaagaaaactactacattctcttcttaaaaagggagtgggataaagaaaatgatataagaagtctttacttccaatagatgtcctatttctggaaagatgttaggccttttacccaatgacctaccctttaagtttcaaacttcagtttttaaaaatatgtttaactgattaaatcccataccattttcttaaaataaagggacttttcactagcttttactgtatgtcgactttagtggaaccctgaatgggttcaaataataattcatccaagccaagatttctttttctgcacatttctgtttctattttgaggccaggggaacacacaaaagaaggtggggtttctggaagtcatcataaataaatagaggttgttatatgacctccctttcttagaagatacaagctgtgatattttttaggataggtatacttggccatgtgatatttctttgatcaagttacgtgcccaaaccagaattgctctattttttttttaagacatctatttagaaatccaagccgggccgggcgcagtggctcatgcctgtaatcccagcactttgggaggctgaggtgggcggatcacgagatcaagaccatcctggccaacatagtgaaaccccgtctctactaaaaatacaaaaatccgtggcgcgtggtggcacatgcctatagtcccagctactgggaaggctgagacagcagaatctcttgaacctgggaggtggatgttgcagtgagccgagatagcaccactgcagtccagcctgggcgacagagggagactccgtctcaaaaaaaaaaaaaaaaaaaaaaaatccagccattggcagtgtgaatctggctgcgaaaatgatggtccagttaaacctttcatcggtaatactaaaagtcgtttaaacataacacatactatggtttttgcttttaatacagtgtttttttttgtttccagagatgtaggaaaacagtagtggatataatgtcaatgctcatatattggctgataatttttttaaagtaacacatgtatataattagaaattttaaattgtacataagtacaaaataaattataaatatcttgctactgtaccctctgtagaggtaactgctactaacagttttgtgtgtgtgatgcctaatgatgccagtaataatataataatgattgccatcatctatctatactctctctctattttttatctttcagtttgaaagtcgttcaaatttacagttttctgaaaaaaattatatagcatgcgtacacttgtatacctggccattttcacataactgtatagcttgcatctctttccatactaataattatggatttacttcattctctttaatggctacatgatgttctgctataagatctatcataaattaatcaatggggacagtttataaagctactttatacacaaaatgaggatatattttcctggtcttgttttagtccattgctaatacaaagcagtatatttccaataatgtatttccttttattaaagtacaaatatatcctttagatgcatgatcctaaactgacagttttttgaaatgtctgtagcctgagtatcctgtggcataaataataattagacactatctgaaagtcagaagtgtcagttattctccaaggccatatttatataagatttggaatcaaaaatttaaaattctgtcatgaccttttatcaaagaggaaaacatttggccaaatttacttataatcacaacttaatattgtaatcttactgtcaagaaggttagactaggaaaggaaagaaaagaaacagataattattaagtgggttttatgtgccaaggattgggttagatggtaacatacgttacctttaattaaaggagtatcattattgattatttaataattagctctcctgaagttatttccaaccaccgtgacataaatactgcagacagtcaagtctttattactcccttaaatgtcctcctattgtaacaattctgcccttatgaatgataatgaaaactgctaagaaggagataatgttaaggaggccaggatggactgagattctttctgatattaacaataaactgacaggtcacccacaaaaatgtaaaaggtacattaaaattaagtaattcacccaatccccagcaaatttcagtgatagccttgagaataattgtggtcaccagctacaaagcttaggaaaaatttaggacatatgcaaggataattaagaaataggcaaattaaaattgaaatgatgacttatgacaatggcagtgcatctcttcactgactgctattgggtggtatctattccctcatcactttgttgtgtatacctgtgagaaacctttgagaaatttcacttcagacagtaagaaagaggttaatgagtcagacctttctgcttttcccaactgctattttatctctgacggtgacgttctcacctgaaatttggcgagtgggtgattacgagcatgacgtattgagcacaggaagaattcaataaatgattgctattgttaggatgatcactattactacaattttagttatggcaattcaagcatttccagcttctcttaataataaaactatcaattatccactttctgtaattctatttccttttaagtctatactgtttctcaaagcaacacattttctgtttgctgtccaaaacataaagtagcatttcctttctttttgcatgtcttaatgacatgacacctccttgttatctcttttccgatgagaggaaggtgactgtatgactatcatgatatagaggcgtggaaagagtgtggcatgaggtgtcaggaagatgtggattcaaatcttttcctgcctctgctgttagatgaatagcagttcctgaggctgtgaaggttaagtgacgttacacatgtaaagcaggtaacagagtgcctggcagataacacatagtcaggaaatcgtatttttctactctagcactattcctgtctcatatattcttcctttccctcctttttggaacccgcataagggatccgttagttctggagaagcgctatccaagagaactttctgaagtgttggcaatgttcttacctatgtagccattagccatgtatggctatttaaatttaaattcaacttaaacagaattacattacatttaaatttcagttcctcagttacatttctagtgctcaatagccatgtggctagtggctgtgtattttggaccgcacaaatacagaatacttccatcactgcatgaagttctgttggacagcattgctcttaaacaataggttacaaatgaggtttagtgtggctacagaggtgaatttttacattttattcattttaattaatcataacctaaattgaaataaccacagatgaccagcgctaccacattggacagcacagttctagagtgtgccacaactgccttggaggttttaattggcattttacagttttatctgaagccagtgattctgaggagtgggtggatgattctgcaactccaagtatttgtaatgcgttttggttccctctcctccactatgactaggctaaatcaacccaaatctgatggtcttacatgcttagctatccccaggtttttgatttgaaaactcttatatatcccattggattttactagccttacttattttattttactacaaaatcagtaaaagacattttgtggtgtgcctgacattgtttggtgaatgacaaggtttggaggaagtaaatgggaaaatgacagcctgtagcagaaggtcttaaccacagagactcaacacattgaggtgctgtgatcatttctgaggtgtgtggcgagtaatttgttgctattgataaagtgtcaacatttgcaaattattccctctttttattttaagaaattaaaagtgttgaccactgagataataatggtccattcttcatttacgttttggtatgctcacttgaatgagaaaggtgatgtggagttgcgtctggcatgctggtggtggctcgcagacctgggctcatttatgagattgggtcattgatcagaatgtcatccatgtgtgtcagcatggagaaaactgttaaaagcaccatgagcaataagatgtcaagcaatacattatactgatgcctggtcatggagactaaccatatctctctcactgcctgaatcttgtttaaaaaattagatggcagtgatttagtaattagactgtttaagtgtaaaaagtacgacttaaacgtgttttcaaggtgatacagggtcaaggattcgtcttgttgacagagagaagggaaaggtgatgcagtggaaggggtattagcggggattaggacaaagtggaaaagcacagtctggaaggcttcacaagcaaagagagatttaaacatttaatggaaaaggaggaaaaggtcacacaaagacatctctgaaggtcaggaagtaatataataatgctaacagcatgcagaatgattatttaactgagttccgtgaatgtgttcaggtttttgtttgtagattctgaagacacttgtgtttagaatacacataatgagggaatttggcatctgttcttgtctgcttcctttactttacttatgggcagaagaaaattgttatgccacgttagaaattctctttggactctctaatctttctgccctgatacaaataaataaccatctacaaaaaaatgttttatcctgagggaaattgtgatcacttctaattcaccttgttattaagtaaacttaaaaattgttgttaaggtataaatcagaagatgtatacctgtacttaccagttttcttaggatagagtctgagtttattctagaaaatggcagatgggcacaaagaccacatcagaacttcttactgttggagaagagtgagtttggctaatatagtatcatctgcacatttagtttgttctttctttgctgacagttacatggatttaaaagcctattaagaatgagcatgatctgtctataagcagtggaagcacatgatctgatgactgttttataaacagacctaagcttcattctagacagaaatagattttcacttattttgaggctaattataaattggaatggtattctttttgatggacaattcaattgcatttaaattcaaacaaacatctgctgtttatactttatatcgtgcaatctacctgaatctaaacagaagctattaaagatctgtggctagagaatctttgttctctgaagactttaacggaaaaaagagcattctctaaactctcattattggaaccaggttatagttgcccttgaacatcaaggatgcttttctttgtccacagatatattaaagggggttgtgcacagttaccacaaacacattttgctacacagggatctgttaaaactgttgggcatttttcaaataatgtatgtgttttaaatgagtaacacaaatatgctattaatatatttttgttcagatactgttttatatatgaatttagctcatatatatttacaagaacatttaaattcatagatgtattaattctgttaatacaggaattcattcatagctacatctgatatatatgagacacatattcatacatggtaatatttatggagagatggagatgcatatatatgtatataataaatcagtttcacaaaatttcaaaactgatgggaaataattagctacggcttctacttttggatgttattctttattctaaacaaatcttgctcacctatagaacacttgataatattatagattacatggggactaagtactcacgtgttgccaaatgcttgaagaatgtttgtggttttcacctgagaagcatgtgaagtactgtgacagagaggtcgaggagcagtgcccaaggatcattacaaagctgtggtcaaagacatataatatttataagtgttaatttttaaaattatagaatcagacaactggcattttcctcacaagtatttaggctaaatttgtaaaatgacaggcagttcttatgggatgatactcggtctaaattagtcctgatatgtaacttacaactttgaagaggcaactgatactattgaatggttctttttttcttttaaaaatactactaggatgatataccttgttatttgagaagattttcatgttaaatctgcataaaattataaaaacatttttcatgagcatgtagctttaagtaacacttcaagttcttcacattattaaagtatttatttactaattatttgtttgacagactgtggttttgaagcagcaaaatgtgtaatctatgttaactcaaattaaagattcaaaaacaaacatacgcacaagcatagataatacttggtagtatatttaaagccgtttgccaatgtatcccttcacaaaagaaaatataacattatacatgttacacatcccagaatatgcgtaatagcataaccagaacgtattcttttccaagccaatttaagaggaagccaaattgtaatcagaaatttgctttaaaaggtgaaattgaagtcaaagaaattgctgctttctgaaaaatgtttcttaagaaaataatatgcaatacacaagaaaaacaaagagtcagttccttaattttcaaagagcttgtagaaatcaataagaaaaaacctaatacatcaatggaaaaatggacaaaaaagataaatacttgaaaaatacaaacaattcacataagttcaaatgaccagtagatatataaaaaatattaaacatcaaatataattaaagagatgaaaatcagaataagatgcaatttttaatctatgagtttggcaaaaaaaattagaaatttgctaatacttctcattggttaggatgtgaagaaagaagctgcaatgatctgaatatttgtgtccccctaaattcatttcttgaaatcctgacccgcagataatggtattagaaagtgggaactttgggaagtgattaggtcatgagacccagaagatacctcttccatataaaaacacagcaataaggcaccctctacagtctaagaggcagcaggccctcaccagacctgaatctgcctggaccttgatttggacttctcagcctctgaagatgtgagaaatcattcctgttgtttataagtcatcccgtgtatggtattttgttatagcagcccaaatagactaagacagaagccatgtcagacattatgaatggagctataaattggcacaatgtttctgaaggaaattggcatgattaatcaatattttaaatttgtagtaccattaacccaacaacctcacagctcaggatttaccccagtaacacacttgcaaaagttttctaagatatttgaaccaggtataccttgtaatagcaaacaactggaaaacaaaacagttcctttcaacaggaaactgtagggaaattaagttttaatgtattgaacaaaatactctgcatctgtgaaaagaatgggttagctgttggtgctgatgtagaaagagttctaagatgtattaagtgaaatacaaaccacgcgtgcacgggtgtgtgtgtgtgtgtgtgtgtgtgtgtttaatcctctgggagtatatgtaatagtcatatgtattttactaaaaaatacagacaaaattataggcagtgtgagatgtttagctttcattttacaccttcctatactatttgaaaaatgttatgccatttttctggatttcacttaattaaagttaaatatattaaaaatatatatatttaaatatgttgtgcatatgtgtatatgtttgtatatacacatacacacaaatacatgcatatacacacacccctgcttcctgcttgcatgtacacacatacacacacacacacacacacacacacacacacttttataaagtatcccttagctaaataacctgaagggctcctctccgctataaggaaggtatcactttgaagtctatattagtggaaattttgttttctgagcacttcttgattgggtcactgacttatttaattcaaaatcctcttctacttttggtattgcttgttatgtgactttggaccaattaattaaccttttagagcttctaggttgttattgttattgtttgttttcattgggaaaatgaaggaaatgcctgtttcagagatgctgtaagaattgtataataaaacaattatgcacatagttcaatgcctggaccctaaagaatgcaccatagctgttggattgttgcactcatccagttctgtttttgtcttttttccacaacacctcttctcctggtcttcatttgtctgtctcttctaccacatgaggctctgcttctggaacccagagttaaaatgcttcagtcaaccctattatgggttgaatgtactcttccgaggtggcttgagaatctaaccaccatctataaaattgtttccagaaagtgactcacacattaagttttggaacacaatctgttggaaattggaaggtacctggactgtgactaacagcatcaaacaaagatgcattatttctccattttgcctattatctacaactcagtcatgcttttcactgccttcaaagggtgtgattgagctcttgataaaaccctttcaattcaaatgctatgatagccaaagcaaagtattcatggagattatgctttgccttcaacatagggaactggaaatgtaaatttattaatccttgctctgtgccagacactgtgtcaattgtctgatacatgttatctcatctaacggtcacagtaactctaggaggcaaatattcttctctccatcttggagaacaggtaataggctcagggaggttaagtaacatagacaaggtcatgtagcttgttaagtggcagaatcaaagttaaatccaagtcatccatatgatgccaaacccatgtttcttctgtcgattgctaactaattgaggttttctactccaatgacttctatatcttatttccaaagctgttctttatatttttctgactgttggcattggcattgcaacatttaatccatttatggtcctcctatatagctttaaacttgctacttgaagaagtaaatctttttgaccctggtagagtaatttttcaatgaccatcttatagaagaatacctttttcgttgtcaagattcattattgtttggatggctgccatgcacttgtaaagaagctggatggagttgggagtggactttcactgtctcaacatgctcaccactcttctccataactgcgagagatggaccatggatcctgagatgccattcacagaagcacattcaataaaattcttttaggcggttacagctaccaggtcataagtactatttctctaacatggctaaatacaagattttaggaaatacaggatccttaagaatgggtttcttattgcctttttctcttaaagactgtgattactgtcctcctggtatgttctacctgggtctctgtttacttcattagcactcccaaacacaaatgtgaagtattcagagtggagttttttatgccatgttcattctctacttcctgtcaaaatcccttcatttttcaaacataagaaacatggtgtttttatgctacccaccttccttactgtattatttgctaaactggggctagatagaattatattctgtactttatcaattagctattgctacataacaaaccaccctcaaaagcggtgtttgaaaatatcatccatgtatttagctcataattatgtgaatcagcaatataagctccggtcagctgactactttttctggtcttggctagacttctttatgaattcatggtcagctataggtcagttggtcagttgtagagcagctttagcgatcttagttgagctctcacatgtctagggccctgggtgggataaatggtgtggtttggctctaatccacgtagtgtctcatcctgcagcaggttcacacaggtttgttcatggcagctgggcagtgttctaagagagtgaacagttgcaggcaaggcctcttgatacctaggctcaggatgagcacactgtcacctccactatattctgttggccaaaacaagttgcagggccattctagccagaggaagtggagaaatacactctgcaccttacagagaggagctgcaaagccacattgcaaatggtatggacacaggaagaagtggagaattggagccctttctgcaagcgataaaccgaaacttcctctttattgctgttctctatctcttgccaaagtgacttttagttcttcattaatctgtgccaaggtgctgttgtggtgagctaggtgattgtagtaacagatatacaatggtttatttgtaatatttaaaagatatattttgaaagaatttgtggttagagtggctaccacaagcctttctacagtggaaaggctgtagaacatgcttatctgcacaggagcccagctaatcatttgttgtttctgaactgcttgtctgaggagtttggagttcctgagctaagcatgagggggaatgggctcaccaaactgctataatgaaatggactctttctcaaattgtcttattaaaaaacagtaaattaccaaggtcgtatagacattttccttctacgtgtttattctcaactctcactgctgcctaataattatagctgctccagaaattaggtctttctggtctctcacaggtatttgcaaactagcgtgctatcctggctagacagctaaatcacttgatgcaggtaaaatacacatctctagaaaattcgaaagaagcatttgcaacttttgttttacagaagattaatcctctttgttgttccttgaaaaattgattttgagatgatagatttgataaaccctccttattaaattaatcattaatacttgcattcaataaccacaatgttaatatattaaaatgtctgggaaaacctgccctaaaaagccatagctacttaatgggctaatttttctgctgttccttcccacactaatcctgagatctgctttccaccctctgtgcacttctgtaggtcccctggaatctaacccctgtggaacacatccaagctctgtgccccctgactttttattgggtttggccaatagaagataacctgtagaagataaaagaacaggaggaaaatagattttccttccctgcatttttgctgctttggtgccaattcacctaaagtagctgggctcctctatgaatatagctcttgcagagcaggccctccccatggctccagctccccctgggctgtaagaaacaatatttcttcttcgcccacttcagcatcagggatgttaaaggcttccctgttattgcaactccctcggtgtttctccaacccttgattatttcattaaccctgcgggcacttctttaaacagttccttcatcaaagtctgttcctaggagttttatcctggggtccaaggaccccaatgacatctgtaaatggaaaagggctagtgaacttggataggaaaaaaaataaattgtgaacttgtgtagttaaaaaaaatttactcctttattttcgctaacttctaaaagaaatttagcacttccttcagttatgaatgtaaacaaaagacagtggcagtatctctgattttgtcatcaacaggtatcgcagatgttttcatgtcatattacagatttgtagacatcttgaaatactgtttaatcgttatcactattttgaaactgtgttagtaatgaggcccaatgttagatcacattatttaaatggattgataaagaaagcacatttattcctatactagaaatttgtctttaaaatattttgttaactgagtttcaatttaatttgtatccttttgcaatctttatgcattttattttatatattttctgcagtggggtccataggcttcaccaaactcccaaaagcttcatcactgatgcacaagcaagcgcacacacacacacacgcacagacacacgcatgcacacgcacactcacacacacgcaagtgtttaagaactcctgaaccaactgagtggattataattctgcaaggccatgactgataaaacacaagttcccagtctgtttgaccagggaatccattttttatgtttgtggattaggattttatgggactagtctttcacaaaatacacttaggaatagacatcctacagaaatgacccatcatatgagatgtccagaaatggagcaagcagtcatggagctatctggtcagaaagggactgttgcttcctgagtcccactgggtacaggacttgtgcttctcagaccttctttgccccttattttttctcccaacctgttttctttccagataccacagatctttttcttaggttcactactcttgccatccactacttttcccttcatagcccctggataaaattgtctcccagtgtcctgaatcctatttcataaaccgtctgtgtttattcccatggtgagaaaagacttatggggtatactatttgactacaggcaatcacaccaaaacaaaacagttattctgtaccatcaagaaggtacagtatccattttccacctgggaaaaatctctcagcttctctgcatttgtcactggaaatatgatttagtcctgtcagggtagtcaaacacatctttttattgtttatctctggttccctactaattaaccatgcagaactggagatgaccgcaattgtgctattaacagatgcccagtctcttccattaactgtgctcttcgagagtgacattttccttttatttattttagtattctcaggtcctgataccaggagctcaattatgcttattggatgaataaatgaggtgcaaatgtaagctggggcaagaagggtttgctttgtcaacagatttagtgactaaaaaaccacactgaaggaaacttaaggacagcattcatattttattcatcattagacccactaaggaccatgggcatagtgttggctgcttactgactgggccatgatcccaggttccatcttatactcctgagaggcagagccagagttaacacatttagcctttagaaagacacaccatagtgctgaccattctccctgaagattttggttttctgcagatatttacaaaatcttcacaaggattgtgacaatcttctttgatttttctggtcccatcagtgccaaaacttatcaatctatgttaataatatatgcaattttaggtatatgttttcaaaagtcttactaaaacaactactctttgaggagtattttctacttttcatcggttttctctgttttaaacctgtaacttttctgtcaaagagatttgtagtgtcttgtttttccgaaaggtttttaagggtcttcctgaagtttgagttctcttcatgttttctccctttgatttttattttttgtcgcctgtggcagtactttttaaggattttttcttttttttattgaagtcagcattttgaactgtgcttcatatggacagttttctgacatcaagcttgcgtgtgtcagctggctccaagttagccttcagctttgaagaagaggcttaaaatcagcttcctgtgcatgaactttagtggttgataagtcgatcatgtacccctgtcttgccagctttggtcatcactaactttatcataaagctcaaattcggtctggtaagtaaaactgtagagaacttgggaagagatattgtcctgcaaaatgttaattcttgaatttatggtacatatatttatttgaattcctctttttatttctttggttacattctcttactctttgcttctgctttatcttttgaaataatgtctattataatttgtgaatcttagcaataactacagattgttttttaatgtttgctatatggttgtcattaaaatgccaaagcattttaattcaggacaacttcagtgttaacagaagaaaagatgaaatactatttgggagggatagcattgggagatataccgaatgctagatgacgagttagtgggtgcagcgcaccagcatggcacatgtatacatatgtaagtaacctgcacaatgtgcacatgtaccctaaaacttaaagtataataataaaagaaaaaaaaataataaaataaaattaaatttaaaaaaaaaagaaatactatttgctattaaatttacattgttttcactctttccctgactctgacttcaaagaccaagttgaatgttatgtctttggtgaatccattcttatactttttaccattggaattgattctttttctatcctctgtgctatggacgtaatcataataatgataattgcacccattgggcacttaatgtttgccaggcactatgctaagtacttttcatataatagctaacttaattttaacaataaccctgtgagataagtattatactattcttgtctccattttacatatagggaaactgaagtgcagactgtgaaaatgacgttttatctcagatctctttaacttccaaaccctagcaaccactcagcattgttgccttaaaagaaaactataccttatacctcatttcattccaagtcaccaaacttcttgtcacacggtagatgctcaataaatatttgttgaataaatgactatgaaagaaaattcttcacatcaatgacagttattcagttgaactgtaagtagaagtctggaacctgttaacatccacaactcatcaaaaatttgctcttttattctccgttactcccatcttgatctcctacttcctgtcactctaaaccaatcattttaccttccctaacttctacttggttgttccctctcctttcttgctgctcggtgaagacatgagaatggcagagggaaccctgcttggtttgtgtaatagcagcagatccttgttctgatatctgaggtcacgaatacccacttttttcctccctgttgcaccctggagagcccctggcatttcccaatcttgagcagagtagaacatcaacccttagtcttacagtcttctcagatttggtagatctgccctttatcactgggaatgtcaccaactctggagacttgaggaagaaggtacaaagctatttcatatacaccctgccccctccatgtgcttcttagcagatggtaagagtatgtttagttttgtcagaaactgtcaaactgtcttcaaggtggctgtatcattttgtgtttgcaccaatgaatgagaattcctgttgctctacattctcaccagcatttggtggtgtcagtgttccagattttagtcattctagtaagagtgttgtgggatcccattgctgttttaatttatgttccctgatgatacatgatgtggaacatctattcatatgcttatttgccatccatatatcattcttggtgaggtgtctattgaggtctttggcccgttttttaatcgggtgtttttttcttgttgagggtttttttttttttttttttttttttttgatggggttttgctctggttgcccaggctagagtgcagtggcgcgatcttggctcactgcaacttccacctcccaggttcaagtgattctcctgtatcagccttcccaagtgtctgggattataggcctccgccaccaagcccggctaattttgtatttttttagtagagatggggtttctccgtgtgggtcaggctggtctcgaactcctgacctcaggtaatccgcccaccatggcctcccaaagtgctgggattacaggcgtgagccaccgcgcccagtcttcttgtggagttttaagaattctttgactgtttggtataacagtactttattgggtacgtacttttcagaatatacacacagacatacacacatatagtaacacagtaatgttgctatatgaattgaaatgtgtctctctaaaagatattgaagtcctaatccccagtacttgtgactgtgatcttgtttagaaacagagactttacagatgaccaagttaagatgaggtcattgggatggagcctaatccagtagaaccacatctttataaaagaagacaatttggatacagaaacacacgtatgaaaataaaggtagctattaaggtaatgcatcttcaatttgaggaatgtcaaaaatttccagcaaaccaccagaaactaggaaaacaccatggagcagattttcccttcacagacctgagaaggaactgccttgccaacatcttgatctcagatttctagcctctataactgtgagacaataagtttctgttgtgtaagccatccagtttgtggtactttgttatggaagacctagaaaactaatgcaattatctatgcagatttagccatctccccgtctaaaacataaacacagacatcaaccaagaaggtatctgagtagtgacaatagatgccagagaggtcacagacgcaaagtccagtactttgttatcaataggcatgcatgcagagccttttcattccttttaaatttctaattctatcaactatctttctgcttttcaaatccatagctgcagtggatgagtcaatgaccaagaagagtttctgtatagacactgattggaaggtaccaatcactgataagatagcaggagaggatcaaagaacttgtgaatagtaaatagtgtcagaaacaatcaagacatatgcctgcttgcgaagaagccacaaaaaaaacaagataagcatggtctggctcttcagctgtagactttgccctgtagtctccctgtctctgcatccccagaacccaatccttcatctcattccacatctctgctttggttcacatcagatattacgccagcttctttcatcactttatttttctaattgtctttcatggctcgatcatgttattcattctgaatatttaacttggtaaacctattggttcaatatgtgtcctattcccaaacaagcttttcctccaagctcctcctgccagccaaaggtgtaataggatgaatttgttaaaatgccaaagaccacaaaaagcaaagtgatcaggagctcattagggtagaggcatacatgcttgaacacatgattatcatcagggcatcattgtattatgaaagtacaatatgattatttcattgactctgagccataaaaatatcaaggaaacagctacatataaaataatacagcttagaaaagctcctacttctgttgtacaagttgttaaaagcttaattgctttaaagtcatgattgtccagattaactctttatgattattggagagctgtttctggtttgctctgatttgtgatgtgtctcttcctttttccttcctttcctctttctgttctaccttatgtctttctttctttctctttctttctttctttcttttctttcttttctttcttttctttctttttctttctctttctttttctttctttctttttttctttgtttctcttctttttctttcttcctctttctcctctttctctctctctgtctctctctctctctcacacacacacacacacacacacacacaaacacatgcatgcatacatcttcttctaaaaatatgaggccagcagtgcgtgtgtaaaaggtagatatctgcactcaagatgcaatttcaggactgaaataggcccacctgacaaaagaatccccacatccaccttgtagcccttcagtactttgcaaccttcttttctactataattctaatgatatatgacgttgtgtgaataagaaagcattttggaatgaagtcactgaaactgacattgaattgagtccatacattatatattttatatatataagaatcatatatattttatatatataagaatcttatatatattttatatatataagaatcttatatatatttttatatgtaagaatcttatatatattttatatatataagattcttatatattttatatatataagaatcatatattttttatatatataagaatcttatatatatatttttatatataagaattcaagaaattgaatccatacatcatatattttatatatataagaattcatatatatgtgtgtgtgtacacacacacacacacacacacacacatatatatataaccttttgttactttaacttattgatggatatgtcatacaagtgattgagtcgtaccagcagcctggaaccatgcctgtagatcagctgctttaccaggaagaacattggttttgtatgaagacaaatgtagattactcctggcactggtacttttgacctggggcaagtttactgcttatttctttccttgggttaatctatgaggacttaataaactattgtcggaaaatggttgcacagatcaaataagatgttaaatgatagctctgtcccagaaccaataagccttggtaaatgtttgtttatctcttttatttgttaaatctcagtcagttcctagttgaagtcactcatatgtagagaaaaaatagctgatgttcactgttacattgcaggtaactcagatgtagcttcctcctttttagtttagggctttgacatatttgagtttatcagatgaattaattgtcaccctggaaggctgagaccaggatgccctactgaattgcagacaagtggagtttttttaaggggacttagaaaagagagtaaaataaatatagaagagaggcaggagactggctataacaaatcttggcagtctgagttcacttggccagagactagccctctatggagtgccaaagtgggtccctgtatgtaaggatgaggtttcacctagtgacaaataaatgaccatgaataaattattctctctgtatccatcacagctcctagaaaattgccttgcatatggcagctctcagtgtttaatgagtgaatgatttattcaattaatcactgaattttaaatggatgggccatgagagatcgtataatcccaaactgttactttacacctaggaaactgaagcttacttattgtcttactgagcgtatactaaagagactagactttggtctactgactccaacatgaggctctatgctactgctttggggatacaggatatacagaaccttcatttcaaactagaatcagataaagagttgacttcttccagctgctgcctttttctttctccacagataaaaattcccaggtgtctttctcatggctctaggactaaagatctatttgttttctaattaaaaacaccccaagcatcagatgctatttctttgtcttagtggctcagaatatctaggtgccctgtggtgtgctatgcttttaggtctctccatgtggtcttaaaaaaatgggggatgcagtttatggtcatggataatacatactgaaatttgacaaaggtcagtaattgtgccccaagatgccttgtgctatacaggttgtgagggtgtgctggtgtgcagatattggctcagtctgtcacagctgatctcctttatttcccatttgtctgctgtcatttgtccagactctatactttatatgcatactgttcacttctgcatacctttggtactagcatttggctaatcaaattctaagatgtctgcaggactagctgaagtcatatttgctggatgatgaagctcccgttccttgacaattacagtcatattggtctccttctccactgcattcttaaaacctttgaagtctgaccatcctttattctttattatgtgtgggactgaatatgttctatgcttgtatcttctctagaagactgataacatattatattttcattgaatgaatgtttggtcaaagtctgctttggttagcgttgccagataaaatatagaacacttagttaaatttgaatttcagataaagaatgaaaagctttttagtataaacctgttccaaatagtgcatgaaactttattgtattaaaattcattgtttattatctgaaattcaaatttaactgaagttttatttttatttgctaattttggcaactctcttggaagtgtttttacttcaggcctctcttagaaaaattcttctttgtggcaaagaatatttgaggattaagcaatctgcaaaacttttatcttaacctataaagcataggtctgccaggattttttgattaatctgctccagtttttgcctgtgtaatcctcacactctcatttaataaaatttattgtaacataagttttatttttcttatacagaatataatctatgtaaagttgtatatcttgaatatacaaatacttttcatgaatgctagatttccatggttacatataagaataattagcatgtagaattcaaacaagaaagcaccaccaataactgacatataaatgcataaacatcactatagtgtcagttgtgtgagagtaacgatttgcctgtgtttccttctgtctcccatctccagtacctaacacaagtggtaggtgccctataagtagctggctcttactctgccttctctatctcatccatccttctatagacattggagtcacaggtcaccaggatttcttcctttatactctgctttctaagtcagtggttctcaaagtgtcatcagtcccttggccagcaactgtcggccacacctgagaacttgtaataaatgcacattcttaggccccattcctgagaaagggatgagaaactgcctgagaaacactaggggtgaggccaacaatctaggttttaacaagcactgcaggtggttctgatgcactcttaaagaaccactgggagaaccaatggttccctgtgtttttatatataaaatacagataacggatgtgtaggtaatgatcacactgctgaaatgaacttgatacaaataaatcttagtcactagtgagactttaacaggcctttcctctgttttactttttaccccctttcctcccctttgtctttgtcctcacaatctaaggccttgtttcttcacttttaccaagtagtatgttgaaaagaaaaggcctggccattcgtctcctcctcccctcttcctcctcctctttgccttccttgttcccttcctcctctgctttcctcttttctcccttctctttttctctctcttttatttggcttgaatgtcgagcttagcggttgaaatccttcaacaggcagttctctcatcctgtctgtcactcacataaatgagcctggactagcattgtcttgactgatcctaaaattttattttcagcacaccaaaaccagcttttcatgaccagcttttcatatccaccttcttgattctttagcttctagacagttgtctccatccattcctctttcttaatctttcagatctctgctattacttgctattcttgcaggtcgttatccaaagagcacgccccatttgatgtatgcattaccttcactaaaatccacttttcatcgccattactcccactctttccaggcagggatgcttttaaatacacacacatatttgaggaaatgaaatttgttgcttatactttccagaattggccatttactaagattctgtatatctaattcataattacttttgtttcttgcataggacaattcttctatttcttattacataaaactgtgccccagcagtttatcccttcaggagatggcaattaggagaagaaatattttctaattcttaccctgctttcattgtttctaaaaaatctgtctgagggtaatccataggctaaacagaaattataaactccctttgaaaattgattctttttttaacataaaattcacataacataaaatttatcattttaagaattttaaagtatgaataattcagtggcttttagtacattcaaaatattgtgcaaacatcaccactgtctaattccagaacatttccatcacccccaaataactcccatacctgtgagtaatcaatcccaatttcattctactttcagcccctgtaaaccactgatctacttagtgtctctccagagtttccttttttggagattttatttaaattgaatcatagaatatgtggccttttgtgtctggctactttcaattaacatagtgttttgaaggtttttccatgttgcagtatgatcaatacttcagtctctcgtatgactgcatcatattccactgtaaggatatactacatattgttcattcatcagtcaataaacatttaggttgtttccaccttttggcaacaatgaatagtgctgtaataaacatttgtggtgaatttttttgtgtgaatggttatcttggtttttatatacctgggagtggaattgctgggtcatatggtaactccatgttgaaagttttgaggaactgtcaaaagtgttttctactgtagccgtagcagttaacattcccatcagcaaggtgtgaggcctggaatttctccatatcctttctagctcttgttattctatggggggagggtgtgtgtgtgtgtgtgtgtgtgtgtgtgtattttattacagccaagctagtgggtataaaatggtatttcattatggctttaattggcatttctctaatgaatagtaatgttgagcattttttaaaatttatttttttcacactattgctggcttgaagattgaacatcttttcatgtgcttattttccattcatatactttgtttgaaaaaatgactgttcaaactctttgcacgtttttaaataaggtttttagtgtgattattgttgagctgtaagggctatttatatattttgggtcctagaccatcatcagatatatgaagtgcagatattttcttcccttatgtgggttgtctatttactttcatagtgttcttggatacacacacacacatacacacaaattaattactatgaagttaaacttggtaatgtttttgtttgctgattgtatgtttggtgtcatatttaagaaaccattgcttgatctaatgtcataaatatttatacctgaatttccttctaagaattttattatgctctcagcttttgcatttaggtaattaatcaattttgagttaatttttatatatgcttgagtctggggtccaaattcaaagttttgcatgtgaatatccagttgttccagcaccatttgttgaaaagactattctttctcaattaagtggtcttgacatatttcattgagaatcagttgatcataggcatgagtttacttctgggctctattccactgatctctatgtctgcttttatgcctatatcacagtattttgatcactgtactttcgcaataagttttgaaatcaagaaatgtaagtcctttaaacttattctttcttttcaagatcattttggctatttgggatttttgaattttcatatgaattttagaattagcttgccaatttacgcaaaacagcaattagcatttcagtaacgattgcattgtatctgtcaatttggagagtgaggccatcttaatgatattgagtcttccaatgtatgaatatgggatgtctttccattaatttatttctacaactttttttgtaattttcagtatttaaatcttttacttcattacttaagtttgttcctgggtattttattctttttgatactattgtaaatgggatcgttttcttaattttcttttcacatagtttgttgttagcttgtagaaaagtagctgattttgtatgtcgattttgtatcctacaactttattgaatttatttatttattagctctaacaactttgtggcattttggggattgtctatatatataagatcaaatcattcacagacaggtagttttacctcttctttttcaaactgcatgtcttttatttccttttcttgtcttattgcattagctaggaactccaatacaatgttgaatacacatggtgagagaggacattcttgctgtgtccctgatcttgcagggaaagtttccaggcctattctaatgtctgctgcctgagaaaatggataacagttgggacaaacaatataccaaccaaaactcttgggaggaagggctgggaatgagatgttttgggaataagggttttgaaaatgtctgacatatttctgggatctcagcagtcaaatgcagtcccagggctgttcacaagctcaggaaagacctaagaagacccaaagcaatcacctctggcagacctctaggctctgtgaaaccaggatgtaaagtctaaggcagagactaatgcatttatgcttgtaaatgttatacatacatatataaaaatatatattattttaatatgtattatttcagtagcttttgggatacaaatggtttttggttacatggatgaactgtatagtgttgaagcttgagattttagtatacttgctgcttgagcagggtacattgtactcaatgtgtaatctttttattcctcagtcctctttcacccttccccttcctgagtctccaatgtcttgttataccactctgtatgactttgcatacccatagcttagctcccacttgtaagtgagaacatatggcatttgattgttcattcctgaattacttcacttggaataatggcctccagctccatccaagttgttgcaaaagacattagttccttctttttgtggctgattagtattccatggtgtatatattatcacattttctttatccactcatcagttgatgggcacttaggttggctccatatctttgcaattgtgaattgtgctgccataaacattcatgtgcaggtgcatttttgatataatgatttattttcctttgggtagatacccagtagtgggattgctgaattgaatgacagatctacttttagttctttgagaaaactccaaactgtttcccatagagatcagattaatttacattcccaccagcagtgtataagtgttcccttttcaccacatccacccaacatctactgttttttgactttttaataatggccattctgattgggataagatggtatctcattgtggtttaaattgcatttccctgattagtgatgttatacatttttctcatgtttgttagccatttatatatcttttgagaaatgtctattcatgtaattttcccactttttatgggattatttgtttttttcttgctgacttgtttgagtttcttgtggattctggataacagtcctttgtcagatacataatttgcaaatattttcttccattttgtgagttgtctgtttactctgatgattttttttattatgtagctttttagtttaattaggtcccatcaatttttttattatgttgcatttgcttttggggtcttagtaataaactctttgcctaggccagtgtccagaagtgttttccctaggttttattctaaaatgtttatgcttttgggtcttaaagtctttgatccattttcagttgatttttataggtagttagagatcagtttcattcttctacatgtggctattcaattttcccagcattgtttattgaattgggtattctttcttcgatttatgttttcctatgctttgttgaagatcagttggttgtaagtatttgtttttatttctgagctctctattctgttccattgatctatgtatccacctttatgtcagtaccatgctgttttggttactataactttgtagtataatttgaagtcaggtaatgtgatacctccagatttgttctttttgcttaggatttatgcttgtaaattgcttttgacagtgttccatggggtaacagctttagcactaggtaatttcccagtcaggttggataaatactggccttttgagtggatcttccagggaatcattactacataagaattctttgttactttgttacattctgctccctcagatattggtacttggaatgatgactgttattttcaagactgctgttgagctgggtagcaagggataggactagggtaaatcaaaacacaaattcatgcttcttacagagagttagccagtttttagtttgcatgcttgtgttaaaaatgttatctggattgcatcaatctttggttagattccagagttctgaaaaggttgattccaatagttttggccagatttttaaattattttcagggagaatcatgttcttagagtcttttaatctgccattttctgtaacatctgggaattgattatcgaagaacaagatctcccctttcctggatagcttgataaatggatcacacccactgggcatgtttagtctggccagaagaaagaggattcatgtggggttctctccacccccatgttgccatatttttccagagtcaatataatagaattctaagtatttaatattatgactcatagcattttatgtaaccaatatcagtaataatgcaattaaaaaacaaatgctaaatttatacagcagttttaaaatggtaacaatgggaatgtatattatcagtttatttttctccctaccatactgtggaagaggggtttttattaaccttctaacataaaggatgaacaaaattatgagtaaataattctgcctgtcttcagatgaatcctgctgttgctagaggttatcagaaagaataattgattgagtgcatccactatagatgtagttaggctaaggtcaatcactttctataaaagggaataagaaaaagctgaggaattatttgcctatcttggatatcagctaacatttcctttaggaaggggaaggacatagattatgaagcaacttgggcaaatagcacgggactgggattcaagatatagttcaaatcactaattctatgtatagcctctaaggctctctgaagcttaatttttgtataatttctgaagggatttgtttaggcctaggttgcaagcaagagacaatgacattacatcctcctgctggataatgcttgtgttctattgaatcaaatggacacatacacaacaagattatcaccgacttttagaatttttgtgttcttgaacaagttttattagagttattcaatggcattgggtagaattagcacaccaataggaataaggttgaactagaaataagtctagctgtgctatacaaaatcctggtcaagttctcactgtggtcatacttattttggactgccagagctaatggaattccatacaaggaatttaataagttctattacaggtctaagaacatgggtaagacatcttgaggctcaccattttactttattggttcaatatgcaatagttattccacttaaatgatcacactgtgattttaggattgtctggcaaaccctagaggagttctattttgccacgttggaaatgagactgtcatgataaacgtttctagtaatttttttcacttattgttctctcaaattgcactatgtagagaggcaagaagtagtgtacaatgagcaatgcactatgaccgaagggatatgagtgttattttcaacgctgcctctaactcggtggccttagctgcttgaattggcttggtagtctgggtcctcctctattaaatggattggatcagtggctttgcaagtgtgatgtgtagaattcaaagggctctgtgaagttgctttgggctgctctagggtttgagagtaggtctgtataggtaggactctacacccccttttaactatgaccgttttaattgtttgttttatatatttgagcctctgagcacaaaaatctttgagggaagattctgaggccctggaggtctgtttctggaagactgctcttacaaatctctttggcccattgtcactgaactccatgtttctgacttaagcacaacaaaactgtacaactttaaaattaatgggagttcaacaagtagcaaccaaagaactagcagcactctttaagaaaggtcagcggttacagggaattgtgggatggtacagtgtatggagcatccttgtcaagtgcgcatttattgataatgatgatgacacaagtattctgacagtagctagatatttttggtatatacatgttcttttttgctgtagtgcatttttatttttgtcatattttgccaaacagtaaataaagacatcattaatattcatgagaggttgcaggaagaaaatgttgagtttattttgctttcagggacacaaaccactgaagagaatacgctgtaaactcgtcattggagaataaaatagcaacaacaacaataatgatctacctaattatccagggcacactaaaagcacacagagttgcctaaactcatttatgaaagtgaaacacattgtaaggccccatatttcacctttatgtcctttgatttgacccctcaccccccagagtatacctgaacccattctaattttctcacatatagcagaaacttaaacttagatacaaagccaaaagggctccttggtactataatacgaattatatttagctgccaatatttgtattttctccaatagattgtgctttccttggggccaaggaatctgtgttcccaagagtgcctagcacagtattttgcccatagttgaaattcaatacgtgattgtcaaagtgaaaagttaaaggacgtttagacaaaaaaaaaatctaggtcacaaaggcatttttgcagaacccatgtagattttctggcctgagtttgctggcagctatgcttaggctgggaccagtggaaatgggtctagagcctgcctcagagtggccgacaagtcatctgaagaatcaagatgagaacttccatttcaagcaacagggaaggtgctcctctcctcttttaggattcattgacacttaggaataaatatgccactcaactgaaacctccttcagtttgcatacttgagaaaatgatcacattcttcagtacagcgatctgcaagccacaggccatgggctgttactgggccacagaccaggtacctggccacatagcaggaggtgagcagaggtcaaggagctagtgaaggttcatctgtatttatagccactccccattgctcacattactgcctgagctctgcctcctgtcagatcagatgtggcattggagtctcataggagcatgaaccctattgtgaactgcgcatgcaaggaatcaaggttctgggctccttatgacaatctaatgcctgatgatctgtcactgtctcctgtcacccccagatgggaccgtgtagttgcaggaaaacaagctcagagctcccacttattctacattatggtaagtttataattatttcattatatattacaatgttataaaaacagaaataaagtgcacagtaaatgtaatgcacttgaataattccaaaaccatcccccaatcccacaattttttcatggtctgtggaaaaattgtcttctacgaaaccagtccctggtgccaaaaatgttggggacaactgctttaatagaaatcctacttcccaaatgcttcccatattattctaaagagcagacaggattgagaaacatgaagatctggaaagaatatgggcttcggagttcacgtcttaggttcaaatccttctgtgtccactggctgtctccatcatactgagtgtagagcagtgtgtaagagcctggctggctctgttaccattgcattgtgtgattgtagagctctctgtatatcagtttcacgtatggtagatgggtataatactaatacttgccttacagggttgctgtgatgattacagaagttgtatgtgtaacacacgagtagtatgtgatcaaggacttagttcctgtctcattgtaaattctatacaagtaatttgtattgttgttgttatctacccaactaagcttcagttacatcatctgtaaatggggtggtaatatttatctttaaaagttatgtgaaggtataaaatgacattttagaaatccttgatatatcataaatattcaataaatttgagcttttatttgtataacatgattattatctatttggatctcagtagttgataaaagcctgttctatacatatggtaattggtcatcctaaaagagaggcacacaagtggtcttaccattccccagttgtccgtgtaccagctttctaccatgaattgtttctctcagaaagaaaaatttgttggtcagcttgttggcattttactactgaatatagaatttaggctcaagtagacttataggtttttggcttgatctctgaatgaggacctctgatacagaatctggagtttgatcataatcatatcactgagaaagggtaaattattttacttccctggctttcagattatttttaggtaaaatgaaggaactataatggagctatgatgaagattgaatacactggtgcagtaaagcacttaatacaatacctctggttgcttaggaaattttaatctcctcctttcttcatctatgaagtcaagccttttcactagatttcctttttaagatcatttccaacttcagcatttagtctctatgattttgtacatcgtgcattgggatctccatggaatttttgcatcttgatatcttatgtcattagaggaattttagtgcaacaaaacagtactctaatgctgttgaatattaacatttattttcttacaattagttaaaattagattgccttgactatgcagaaaagggcaaatatttgaatcatgtacataatgattggtatttgccaaaaattcaaattcattgattagtcaaggccaaacattttgagatcatccaaggatctagagaaattaatcccattatatgaatatgttttctttgtaaatcctactgatgactgtttggggaaaatagtatattaaaacataaatatggttcagagagaagtcttttaagccaaaacattctaaaaggttttgctatagtgtctatccatacattctgaaatgcaggttagatgtgtcatccttgcttaaccactgaggaaattaaaacaccaaaaagaatgagagcttcatctatctcctagcaaggaagggaccgagctgagattagaatgcaaatggcactattatctagacttaaataaaacaatgtgtaacccaaaatgtgtatttataaaatatttctagagttaaatgactctattggagtgtattttcccacttactattcaatattccattcgcatttaactctaggagacactgtaagaaccacggagtgttaaacttggggcttgggaatcagagtccatccttgaatttcacaaaagaaacgaccgaaatcaaaagaaggcaagatacagctgttcgcatttgcagacctgtatgtaagtggtcaccacctatgtggtacagaatgcgacatgtttttgttgttgttgttgtttcatttttggttttgttttttaattctggagcttgattttgtttgcctggagccacagtagggtttgttctctatatctcctcctcccctttctctcccctagctgatttccatgcattctggttccaaatacattctaaggccaagtacattgaagagaaataatgcatacatgacccagagtggagcttaacttagattgtcaaaccaacagggagaggagaaagagagataggaagtcagggaaggagggaagaagaaaacgatggaaaaaaaaaaaaacctcttaaaaatcaacctgtgaaacaaaacactgcttgccaaatatgtgtctggctcctgtggactttctagttctgcctgattacacatttccccagtaggttcctgaatctaaaagaacttacctagctgaatgtaggggcaggttgcatagaaaattctgtgtaacacatgaatttccctccctgtatttctggcccttgtcctttgagtttcctggcagagtcaggattacccaatctgtacaagctttgtgtaaaggaaggaacctgagtctggagtaaggcagtcacgggtatgaattccagttttgctatttagaacttgtgtggccttggataagtcactcgatcactctggaatttgaaacccacctttaacatggaataaagataatttcttttttacagtgttctgactataacagataatctatataatgccctgaatcaggggctatatcagattaggtacttcatatttacaagggattactattagttggtacaaaagtaattgcggtttttgccgttaaaagtaatggcaaaaatcactattacttttaatatttttttaaaaacatgcacttggctattttgaggtatcaacccatttttgcctgattatctgaaattactgtcagtagttgctttaccaaggttttaaatgcagaacagccacaggatcctcaaagctgagctgcttattctgaattttcctcccagttgttcctttgtgttctgcataatactttgtagacctgggtcaggctcaatcaagtaaaacttcatgctaatgacttagggttggtatgtgatgaagaaggagccatagggcatatgcatatgtatgaaaacttgggggtcaggcttgaagttttgttaaatctgcaaaaaacagatattgcattaaactacaaactaatgacagtttgctcagggggttgaaggagaaaatgttattggtatccttacggtcaactatatgcaggattggaaatatatttctttttaaataatattatttccgattataaaagcaacccctgatcattatacaaaatctggaaattttaaacaagtagaggtgactctcattaacaagagaatacattacattttagtacataactaggtgaatgtactatgcatagtatagatgtatacctactatgtaaacatttcttagagaactgaggttaacccctattattaaacagctgtggtctattactaaagctgttgatcataggttgtttgaggatgtactagctctatattacattcttgaaacttcaccgtgtatatgttcagcatcctggaaacacacacaatcacttatatatattcacaaggctatactgagcacttttgctttgtgggctgcctgagaaattggaatctccaaacctgagtggttttggaatttgagaagccaaccagtgagaaatacaattttagtacaaaaggtggaagaggattcgaagtagaagaaatagcaaacagtaaaacctagactaggaaagttcactgttgcgcatacccagacttcactctcaaaatctccttgcatctcatagcatcaacccatgaactggttatttgtgtcccaatataacttcttacatcatcattatctgtgtcagattttaagagcccaggaggcaagaattggggcaatttgactatgtttttcataataccatgcagaaattgaaaaaaaaaaaggcttgtaatgatttaatcggaacccagccctttggggagtattgattttaacttgaatagttacgtggtaggaagataatggaagttttcattaggcaaattcaagtcagtattgttttgttcaatgtaaaacagacaataataattaggatttaagacataccaggaaataagaaaaagtggcagaaagtgtttttactgctctgtgtacaatgccttgatatggaaaatgattttaaatggcagagcataatgaagtggagatctctggtgtgtgagttttaagctctagcaactggtgctttcttgggaaaagaaagcaatagatatgttgagtgttcttgttgagtgcacttgtccagtacttgtagaaggacagaatttcattaatccgctcattcatttatttttcatgaaaatgattgttgagcacctaccatgttctaggctgcattctacatgctatggatatagcaatggacaaaatttgacaacagtccttgcatggagtttacaatctcagtggagaaggtggaaaataaactaaatatataatatgatatcaggtagtgataagtggtataaataaaaataaggcagagaaaaggttggagagtatgtggttatgctagtttagacagcatatttgaatgaaggagagaggagagtcaacagtaaccaaaggaaaatgaaccttggaggcacttaccaaacattgggaagggccataagaagagctgaggaactttgtgctcagaataaaaaggtcacagcatgggggagtatgagtggcatggactttagaatcaggtagatctggatttgaatcttttccattgagcaagaactttgtgacttaggccaaattggttaaactctatgagtctctgtttcatcatctgcgaagaagaatatcttttcttcagggttactaaggattagtcatgcatcaaaatggataagcttagttttcattctaatatcctcagcccatttcttgattataagcatgtgttataaagcaacttacagatatgatctcatttaatcctcagaacaatgttgtgataaatagtattattactctcattatacagatgtgtgaaaacttaggcacagagaagtaaagttacttgtccaggtttgtacagttaagtgatggcgtcatgtttaaatgcccaagggacctgactctgtcatccaagcctttaggcactgaacctgcctgcctacctgccacagcattttatttttaataacttcaacttttattttagattcagggggtatatgtgcatgtttgatacatgggtatattgcatgatgctgagaatgaggatacaaatgattctatcaccagatagtgagaatagtactcaacagttaatttttcaaccctctgcccactcccgtcatccccctcgcggtagttccagtatctgttgttgccatctttatgtccatgagtacccaatgtttagctcccacttataaaagagaacatgcaatatttggttttctgtttctgcaataattcgcttaggataatagcctccagctctatccatgctgctgcaaaggacatgattttgtttttttttttcatggctgtgtggtattccatggtatatacttaccacattttctttatccaatccaacattgatgggcacctaggttgattccatgtttttgtgaatgtgtatagtactgcaatgaatatacaagtgcatgtgtcttttttgtggagtaatttatttttcttttggtatatactcaataattgggtttctgggtcaaatggtagttatgtcttaagttctttgagaaatcttcaaactgctttctacagtggctgagctaatttacaatccctccagcagtgtataagtgttcccttttctccatagcctttttaatagtagccatcctgatggactttactgtcctcagttatgaagtgaaggcactggaggagatggtccctcaacaccatccattcttgtgttctctgatctgtgggcacagtgaggaagaaataggtgttgtctgagaagcaagtcagaactctcagatggggccagaatatagctgtttgtgaatgtcagcttctggctacagcacagaatgatctagagcatctggatatctgtactagtaaggaagatgttctactgttatgtatccattttattattcacaatctctttcatgaacctgccaattttctgcatgctaagcatggagtatagtttggtgtggacaaattggtgatctttgtgatgcttattctgaaattttgatcctcttgttttcagagatctgtttgtatcctgaacattaaatacaaaaaggtgagaggattctaagcataagaaattgcaaacacagagagtaaatatccatcaagaaaaaaaatttgtgtatagatagcagtagtggaatggtgtgagtggagaggataaggacacagggacatcacagaattaaaaaaatcataaacatgcttcgtgggaatggaaaagtcataagactctgaagcttctttcaggggtcagatggtttctcacgacctttcccctgtctttcggatatatgctcctctctcaagtatacatgaacttttagcaacctttcataatgctttaaagaaacaaggctgccctagtctgggtcctagcagggaacaaatttaccccagacttaaaataaaaaatgtatagtgagtgactactagcagaggtgttggctgcattaagtggataatcaagggatagagatgcttccagaaacaagcaattagtggggagccatgggtgtctctgagagtgaaggggtaaagagagaaaacataggattattagagcctagttggagctgggtgcatgaaggaggaagattcagccagtgggagctaaagcatgagggacacaagtacagcctacggtacagggctgaaggagggagggatcagggaagaaatccacccattatcttatatctttgtagactagaagttcaacatagtcatagccaaggtgtccaacagggttgcattcctttctgatgattccaggggagaatccatttccttgcttttccagcttccggaaactacttacattccttgacacatggccctttcctccatcttcgtagccagcaatgcaatagagttgagtcctctgacccttctcccatcattgcgtctctttctctgaccacagctgggagacgttctctacttttaagattgcatgtaagtaccttgggtccacccagataatctagaataatctccctaactcaatgtccttaactctaatcacatctgcaaagttgcttttgccattctgagaatcagggcatggacatcttttgtgggccattattctgcctactattgcagtctcctcgtgaggggatttcctcgtgaggcacatagcaggacagagagggagaaaacgggtctgggtgtgtggcggccaaatgacgaatagccagcacaaaggcaatttgacatctatttctcatctctaaaatgcacaaataggttgaacttggttaattttaatgttatcaatctattgactttcatatttattcagttgttacttgaccacctgttatataactagacctttgctaactgcaagtagaaaaactacactagaaatataagatccagtctttagtctgagaagtgtgtatcatctaactaggtcaagggctgttagacctgaaacgactaataagagattgaggcctgaggtattggaggaatgaggagaaaagggagacgagaaagttctgtgggaatcatggaaggtatttcatgcaggttatttaaattcatctgaatcctgaagcacgattagggtttaggttgtcagaagggagaaaacattctgacaatctagaaaaagaaagcaaaaaatgctggaatgaacatatgaaatttgcatatattgttcctcctatatagcaaaagtgaaaaaaaaaactgtcatccattaaatggcaatcatgctcataaaaatgtataggagcctacagagtgtcattaagtttaagaaaatatgattttacatgaattacttaggaatagtattgaatattcacttcagctgacagtggaactataatagtcgtcactgataaacatactcctatttgttttcttatctatctatctgtcttctataaatccatgaatactggctttttttctttgtctcatttgacagtgcttaatttcttccagttcccaaacttctagtctttgtgcatgtgtgtgtgtcatatttgattctaaatatgtgagaagaaatagtctaactctaaaaattccatcagtcactttaccatttgtgagattatcagaccgtgtggggtcaactagtttttaataacccagaatgtttgcaaagggtagtgagctgggaactgtgtcagacttgagggtcaaaaggcaagggaaggatttttaatcccctccattgactatggggatgtagacctcctaacctcaggttcaaatctataaaacatttaaaataatgacagaattaatatgagaaggaagtggttcacagtaatgacattactccaaaaaattcaaagtaccttataaatacatggtagtcagccaactgaagcatcattacctaaacatagccatgaacccagtggaacccaaaaatagttgtcaaaatatcagcccaatgaaaatcagagacaattcattcttacttattcttaaatcaaaaaagaagctaggttccccatattctaagctttatcaacttagaagcaaaaaaattaaaaactattcaggaaagacaacagctattatccaacaaagcattgtatctcattatcaggaaacaaatgagaaaaacattaacgtgaagaaaacactcaaaagtaatgaaagacagatgcctgtgggattagggaaaacccagcattcatggtcattccccgtcctacagaaagcccaatttaccccaaagtgcccagaaggcaccactgtttatatggactggaataatgaatatttgtaatgattacattaaattacacagaacggttaaattatgtttgctatgatttgcctaagacaacagagatatacctaatatattctagagagatattaattctaaatgattaaaattttaatgacattgggagtcttctgcagttttttgggaaacttagctctcagatacttagagttttattatattattccactgatttacaatgtagaatgtcagacatgacaaccattcatgtgcctgactccctaatagttagagttgagtaagagataacagtggcctctaaattctgggcatcctatcacttctcttggagcattttggctggctttggctttagaactggggaacctcagtggcattaccaaagttgagcagctttatcacatggacgcttaataacaattaccaagttctgaagcttcagttaacagtggactaggccaggcacggtggctcacacctgtaatcctagcactttgggaggctgaggcgggtggatcacctgaggtcaggggttaaagaccaacctgaccaacatgatgaaaccccatctctactaaaaatacaaacattagccggccatgatggtgcatgcctgtaatcccagctactcgggtggctgaggcaggagaatcgcctgagcacaggaggcagagattgcagtgagccaagatcatgcaactgcactccagcctgggcgagggagtgagactccgtctcaaaaacaaacaaacaaacaaataaacaaacaaaaccagtggactagctgtgctctaggaccttatagttggcatgcatcatgacagttcacctgtattacttatagttcatttgcactcttattaaatattcatgagtgcctagtctctgcagggctccgtgttaggccctggggatgcaaaaatgaatggtgggataacctgaaaacaaaatcatgtttttttttttctgtgggttcctcatcaaccacccccctactctctacccaccccccatgctccaagaagttaagggagatgggaatgtcctgggttctagggtttcttatgttctaagaaaaggttcaaatacttgtgattcaaggaagcacaggggtaggctgtggactaggagcctaagtgtgctgaatctatttcccagaaggtgaaggaaccagagaaaggatgtgggaagaggcagcatagaataggtggtggctaatcttgagaaacatgatgaataaaggtccttagcaaaaggaagcatggggaaaaatattctgtgagcagaagggttcttgccttttctaggactgtttgaatttggttaataagcctctcagctacaagctcaaaggagtaaaaacagagaccacttcccacatttccagacagtctaacatcttgggactatcaaacaattctgggtcagtgacagtctcggcaggcacctagtaaggatttggaagaagatttaatttgaatttaaaacacaaaataaggtggtatttcatctacctcagagttatgaaacagatttatattcattacaagtgaccaggtcatggatcctgttctagaggagcttgtggtctacaaggatcatttctacaaaataaaactaatcactttgtcagatttttactggcaggttttctaaccttcgcaaaaatcctgaaacacaggaatgattgtctatattttgtaactaaaggaacatccactatgatatatctattaacggaaatggatacaagtcacagaagtagcacagaacaagacacgacatactgtgccatggagcaacctaactctctgggatgtctaaacttagagcattaaaagagagagagagagagaaagagagggagagggagagagggagggagagagaaagagaaaaagagaaagagaaagaaagagagaaagaaggaaagaacctttagcaaatcctgaagaaagaaagaaagaaagaaagaaggaaagaacctttagcaaatcctgaaagaaaacacctttgattgctattgtggaggaatggctctattatgtatatttgtttaaaaactttctttacgtaatttttcaaacatttggaaattgtataaaatgagtgacagctcctttaaatagcaattgctatcactagccctcagtttaactgaatgttatctttaagaagtgaaaggagtaaacagtttctgctgtgactgaaagatgtgccgtagaaagtggaatgagccaccccagattgagagctgaggaccagaggggacaaaggtcactgcgtatggctctcttctgtcacatgccaagtgctatttgacacagttgtggaaactctagcatgaatagttgccatgttttcaccttagaaattttccagttacattttcaaaaaggtggaaggatgacatgcagcgaatcctttatctggtttataatgtagaaagatacgattttaaataattaatgcattaaaaggttttggcaccttgcttcacatttgctttttattttccatcttgaagtatcagatcaaagctacctaagatctgtctttgagagagcagctcccagaggtagcagatagaaaaggataggtcaaaaggtgccagaaacccccaatacaagaaaaattgcaaataaaagtagtcagaagcctttcctttatgaaaaacagatttctgtaagatagactatagcaattcacaattctagcctccttctgaattgtaggcatcctttctatgatattcctaacatgaaggttttcttgcctctgcttgaactcatcctttgtgaggcagattcgtcatcaggaaatctgtatctgtcgccatgtaagttctactcatgaatcttgtttctagagcatggcgtataatatctactctaacttctatatgaaagcccttaaataatttaaagatgactgtgatccttgttcccaaatactttaatttaggtttcctcaaacatgtcatattggctgttctcttctggatgtgctaccatttccaattgccatcctaaatcatgtataagggactcaagatctctgactcggttagtatagtagaattattgcttattttgttatttatttttattttcaaattaatgactgtgatcttttgaataacacattataaaagttcaagtcatccaaataaatacaaagaaaatagcaacaactgtacctataaaatatatctcagcaatgtctacttattttcttctatatttgttattatagctattctgataggtaggtagttatattttattttggtttaaatttgcatttccctgattattaaagatattgaacctctgttcatgtgtttattaatatttgccatttgtatgtcctcttcagtaagtatctgttcatgtattttatccactttctaattggattttttttttttttttttttttttttgagacggagtctcgctctgtcgcccaggctggagtgcagtggcgcgatctcggctcactgcaagctccgcctcccgggttcacgccattcccctgcctcagcctcccgagtagctgggactacaggcgcccgctaccacgcccggctaattttttgtatttttttagtagagacggggtttcaccgtgttagccaggatggtctcgatctcctgacctcgtgatccgcccgcctcggcctcccaaagtgctgggattacaggcgtgctaattggatttaaaaaaattattattgagtgttgcgatttcttcattttaattttaattttgcttataattcacataataattgtatatgtttatgctatatagtatgatgtttcaatacatgtggacattgtaaagtaagcaaatcagggcagttagcgtgtccatcacctcagacctttatcatctctttgtggtgataactttcatgatttacttttctaactatcctaaaatacacaacacactgttatgagctgtactccccctactatgtaataaaacattagaacttactcttcctatctaactgttactttgtacccattaacttacctcctttactcccctctccacccctccacagcctttagtaaccaccactctactctgtagttacataagatcaactttcctagattccatatgtatgtgagatcatacaattttggtctttctgtgtctgacttatttcacttaacattatgtcctctgggtttatccatgttatcacaaatgacaggatttcacacccttttatagctgaatagtattccattgtgtatatatgccacattttctttatccattcattcattcatggacacttgttgatttcatctcttggtgttgtgaaaagtgctgcaataaatatgggaatgcaggtatctttctgacacactgatttcagatcctttggatatatatgcagtagcagaattactgggtcatatagtagttctatttttaattttttttttaggaatctccatactgttttccataatggctgtattaatctacattcccacaccaacagtcaaggattcctctttctccacattctcaccagcatccattattccctgactttatgataatacccattctaactggggtgaggtgatatttcactgttttgatttgtatttacctaatgattagtgatttgtatttgtatttacctaatgattagtgatttacctaatgattatttacctagcgatcagtgattttgctattgagctttttgaggtcgttatacatgctgcatgttaaactctgtcagatgcatagtttgcaaatattttctcccattttgcaggttgtctctttgctttgtttattgtttcctttgctatgcagaagctttttgctttgatgtaatcccatttgtctatttttgcttttattgcctgtgcttttgtggttctattcaaaacaatactcacccaaggaaatgccatgaagcgtttcccaagtgttttctttcagtagttttatagtttcaagtcttacatttaaatatgtaattgattttgagttgatttttgtataaggtaagaaataagggtctagtttcctacctctgcatatggatatccagttttcccagcaccatttattgaaaagactgtcttttccccaacatatgttcttggcaccattgtgaaaaataatttggctgtggatttgtttctgagttctctattctatcccattggtctatgtgtctgattttttgtgccagtactatgctgtttgggttactgttgctttctagtatattctgaagtcaagtaatgtgattcctacagcttttttcttttgttcaagattgctttggctatccgaggtcttttgtgcttccatacaaattttaggagtgtttttcccatatctgtaaagaacgtcgttgatactttgacagcaattgcactggatctgtacatcactttgggtagtatggacattttaatgatattaattctttcaatcattgagcattgagaatctttctatctccttatgtcctcttcaatttcttccttcagtgtttaatagtcttcattgtagagatctttcacctccgtggttaaatttattgctaggtgtttttttttgtagctattggaattacttttatttctttttaggctatttcattattggtgtttagaaatgctactgatttgtgtgtgttgattttgtattctgccactttcttgaattcatttattagttataatagtttttggtgaagtctttgagattatatatatatatacacacacatatatgagtgtgtatatatagatgtgtatatatatgtatatatatgtgtgtgtgtgtatatatatatatatatatataaatgattgtgttgtcttaaaacaggaacagttttactttctcctttcccatttggatgccctttatttcttcctcttgcctagttgctccggctggtacttccagtactatgttgaatgaaagtggtaagaatggacatcctcatcttgttctagatctaaagggaaaagctaaaagcttttgatattagttgtgtgtttgtcatatgtgaactttattgtgttgaggtgtatgttccctctgtacctaatttgttgagtgtttttatagtgaaagatgttgaatttcattgaatgctttttctgcatctattgaagtgatcttatggtttttgctttgattctgtgaatgtgatgtatcatgtttactgatttgcccattttgaatcatctttgcatctctgggatgaatcccacttggctatggtgaataatctttttaatgtgctgttggatttgatttgctagtattttgttgagggtttttatgtctgtgttcatcagggatattgacctgtggttttgtgtgtgtgtgtgtgtgtgtgtgtgtgtgtgtgtgtgtgtccttgtctagttttggtaccagtgtaatgctagccttgtagaatgagttttgaagtattccctcttcttgatctctttggaaaagcttaagaagaatttgtattagttcttctttaaatgtttggtagaactcagtagatatgtaccatcaggttcttggcttctatttgatgggagaatcttgataactgcttcaatcttgtcacttgttattgctctattcaagtttttaatttctttatgattcaatcttggtaggttgtatgtgccaaggaacttaccagttttttctagattttccaatttgttggtatacagttgttcataatagtctcttgtgatcgttgtattactgtggtgtcagttttaatgtttcctttttcacctttaattttgtaaatttgagtcttctctctttttttcttagtgtagctaaaagatgtgtcaattttacttatttttttaaaagaaaaactctgtttcattgatctttatttttttaatctctattttgtttatttttgctttgatctttgctatttttctccttgtactaattttggatttagcttgttcgtgtttttccagttccttgagacgtaacattaggttattagagacctttctacttttttgatataggagatttctttatatattttgatattagtcatcatatatgtgtgttgtaattattttcttccagtctgtagtttgtctttttatcctctcagtgtgatttttcacagagaaaaagattattaaaaatttatcaaaatagtttttaattgtatcactttttctctttatggattattcattaagtgtaaagtataaaaatgctttgaatagccctaaatctcaaagtttatattgtgcttatctctaaaagtgttataattttgttttacatacatgtctgtaatctatttcaagttaatttttctgtaaagtttgaggttttgattgaggttcaaaatgaacctgttaccaatggatatccagttgctccagcagccatttattgaaaaggctatctttgctctcttgaattgctttttcaccactctaaaatatgagtggagcattttttgtgtaggtctatttctgagtttcttagtctgttccattaatctatgtgtctgtttctctactaacaacataatgtcttgattactgtagctatataacaagccttaatattgggtagagttattcttttcatattattcctctctgtcaaaattgttttagctattttagggctggggtcttaccatataaattttaaaataaccttgtctcttaataaaagaaaaaaaatttcaaaaatgtactgagattttgatagaagttgcgttaaacctgtagatcaacttagggagtatggacatactatgttgagctttccaatccatgaatatggtatgcctttcagtttattcatgttctctttctttcattatcattttgtaattttctgcatacaggtcgcataacagttttgttaagtgtatacttatgtactatatattctttggagcagttacaatttttcaaaaattacagtttccatgtgcacatttttagatatagaaattgtgttgattgatgtgctgatcttgtattttgtgaccttactgaaagcacttaataattctaggccaggtgtggtggctcacacctgtaatctcagcacttcgggaggccgaggcgggcagatcatgaagtcaggagttcgagaccagcctgaccaacatggtgaaaccctgtctgtactaaaaatacaaaaattagccgggcttggtggtgcacgcctataatcccagctactcaggaggctgaggcaggagaatcacttgaacccgggaggtggaggttgcagtgagctgagattgtgccattgcactccagcctgggtgacaaagtgagattctgtcccaaaaaataaaaataaaataaaaaatgctaaaatattgtgtatatatttatttgaagtttctatgtattccatcatgtcatttgcaaatcagaacaacataattgtctttccaatcaatatgattttatttatatttcttacgttgttatactgtcttgacctttcagtattaggtagaataacagtgaggagaacagaattctttttttttttttttgagacagagtctcgctctgttgcccaggctggagtgcagtgccacaatctcagctcactgcaaactctgcctcccgggttcatgccattctcctgcctcagcctcccaagtagctgggactacaggtgcctgccaccacgcccagctaattttttgtatttttagtagagacagggtttcaccatgttagctagtatggtctccatctcctgacttcgtgatccacccgccttggccccccaaagttctgggattacaggcgtgagccactgcacccgaccaattcttttctttttctttaggtaggaacttcaattattgatttgaaactttcctcatttctagtataagccttttgtgttaccagtttccctctcagcactgcttaagatacatatcacatattttgatatgttctattttcatttgaactcagtaatatgtgtatttaatagactttttctttgaactatagattatttagaagtgtgttgtttagaggttttcctgttgtctttctgtcattggtttctagtttgattccattaaggctggggaacacaatttgtatgatttcaattctgttaaatttgtgaaatgtgtttttttaggataggatatgggtctatcttggtaaatgttacatgagaacttgaaaaaaaaaaatcctgggtactctgcagtttggaagtggattgttctatatatgtcaactagattctgttgtttgattgtgttcttcagatcatctgatttttctgctgaagaagagtgttaatgttcccaactataattgtagatttgtctgtttctcctttcagctgatcagtttatgcttaatgtattttgaggttatgttttttagtgtatacacatttagaatcattgtatttttattgattaatcattttatcattatacttatctctaataaatttctttcctctgtagcctactttattggatattaatacagccacttgagcatttttgattaatgtttatatatcttttgccatctttttatttttgatttgaagtaagctttccatgcttcacttagggtgggaaattttaaatatcagagctttctttgttagcagcatatagttatgcaatttatttaaatctgcagtgccaatctttttttgatgggtgtgcttagaccacacatttaagataattattaatatgttagaaccgaatatattttgatgattagtttttatgtgtcaatttgactgaattaagagatgcccagacaggtggttaaaacattatttctgggtatgtttgtgaggatgtttccagaaaaggctagcatttgaatcagcagactgagtaaagaagataaagataatacttgtcatgtgtacaggcatcatccaatctgctcaggacccaaatagaacaaaaaggtggaggaagagtgaattatgtctacctccttgagctgggacagccatcttttcatgccctcagttatcagatctcctggatctcagtactttggtctctaagacttatagtagtattatcacgtgccctaccccgtctgaccccctctccagttctcaggcctttggactcagactgaactgtgccaccaagttttccttgccttccagcttgcagacaacagatggtggggcttctctgctccgtaattgtgtgatccaatttccataataaatatcatacatatttattatcatatacataacacttggctctgtttctctggggactcctgactaatatatatttttatatttttgacaacattttattatttgttttctgcttgtttcctttcattcttcctctgtttttctttcttgccttctgtgtattacttaacactttttaagaatttcatctttatttatttaatgtttttgagtgtatatttttgtagagtttttgtaggggtagccccctgggtattacagtatatatatgtgatttactctatgcatatgaacattttaccacttaaagtgaaatgtgggaagctttctttggtttacgtccttatatctttctcagttttaaatatcattttgttgcgtgtcagatgaagttataacctttatttcagtcatcaaatctgatttacaaaaaataatgaaagaaggatagtctattggatgtacccatacttctgctcttcccattgttcattcttccttcccaatgctgcaagatacctttatttatgattacctttttgtttaaagaagttattttagcgagtctttaaggatatgtctgctcatgacaaattgacagatttttttacacttctttaatgtctgaggaggtcattgtttcctttacatttctgaaggataattttaccagatataaaatttatagttgagagttcttttttttttttccagcacttgaaaaatgtggtgccactttcttctggcctctctggtttctgatgagaaatccaactgtcattcaaatggttttcccccaataggtagtgtgtcatttctctgtggctgctttcaaaatttgttctttgtcttagagttttcagaagtttaatgatgatatttcttggtatgcatttctctggatttatcttatttggcattaccagagtcttgaatctgtacattgggttttttacccaaatttgggaagttttcagctgcaatatgtgcaaatattctttcaactccattctgattctccttttcgtagacattgatgatatgagtgttggattttttgtcattgtcccataggtcccaaaggctgtgatttttttttcttttttgtttttaaatagattattttctctttgttgttcagatggggtaaactgagtaaattatattgatctgtcctcaagttcattgattctctcctgtcatctctattgtattgagcccatttagcatgtttttttttttccattttggttattgtatttccagttctataatttctatttggttctttttataaaatttatatttctttgctgatattttctactttatatttgtttcaagagagtttataattgattttttaaaaatattataccttcaaaatccatctcagataatttcaacttctgattcatctcatcttggtgctgtgtcagtgcttgccttttctcattcaagttggaattttctgattcttggtatggggtaattttctgttgcatcatggacattttgtctattatgttagaaagctctgcatcttatttaaatttttattttagcaagtagtcatcttgtataggtttaacatgcaggttctggcctattttgtgggttttggttccagtcataccttaattttcatggtctttgtgatattatttaggccctcttggtttagttggtgtactgtggaccccactgatccatgctagtactgcctgaggtggtagaagttctttccccaccagcaatcccagtgtcttctggaggggaaaagaagtctcgaagagatttctgtgatgtgataggatttttctgcctgtgtcattcattcagtcattgtgatgtctctgtacaggttggagggatctcaggcccatggggcaaaagaggctaccatgctgagccacttgtggaaacgtctgtcttgcttgtgttggtgattgtcctggtatttcttggaggggagggatggaatgggggaatttaaaacctgggagggaaaaatagtgctttccttggacacttatcagtagcaagactcctgattgatccctcttgctagtggtgccagtctcatctggtgttatcagagggacagtaagcctaactggctaccttttgttgcagtttcgcatcagaaaatactgagggtgggtaggctttttctgttgggaggagggacctaaggtaccgtattgctttgccgttcctttatttctgctgtcccaaacaatttaccttcttatcattttttagagttatcctttggaggcctctggatattatttccagggtttataattgtacacagcaatgaggaacagggagaaataagtctatgccagaagtccagctagtgctatttttaattggctgtgtggcttattttactaaccgagttttgccttgtttgttcactcatgtgtttgattatttattgtctagtgctccccattttattaaaaaccaagatagaaggaaccacatctgttttgctctctattgtattggtagcacctgtaacccgacctgccaggttaggtgaatattactaaaaattatttcatttgctttcctcttggtttgtgcttctgatttccttttcaaaagccaggctttcttttaaaaagtgcattattttccttttctttagaaactataattttctgaggtatgtagaatttttagtatttaaatgcatttggtctcagctctgttttatttgattttgctttttaatggcttcgttgatatatacatcacccatttaaagtgtataatttaataattttaagtgtattgacaaatatgtccaaccataaccacagttgattttaaaacattttcatcacctcctaaaggaaacctataccctttagctatcacctattgacctccttatttcctcctccccagttctaagaaactaatgaattcctttctgtttctatggatgtgcctattttttacatttcatgtaaatagaataatataatagtgtgttttctgactatctgctttcacttagcataaagtttttgaggttaattcatgttgttgtatgcatcagtatttcattcctttttatggctgaataatttttcattatatgaatataccatattttgcctattgtttttctatttatcaggtggtgtacatttgagttgttttcaccctcttgtgactatgaataatgatactataaacaatcttatacagcatcagtgtacaaaaatcactaacattcctatacacaaaaaacagtcaagctgagaaccaaatcagatatgaactcccattcacaattgccacaaaaagaatgaaatatctaggaatacagctaactagggaggtaaaaaaaatctctacgaggagaacgacaaaccactgctcaaagaaatcagagatgacacaaacaaatggaaaaatatttcatgcccatgcataggaagaatcaatattgttaaaatggccgtactgcccaaagcaatttataggttcaatgttatgcctattaaactatctattagtctgttctcacactgctatgaagaaatactcgagattgagcaatttataaagaaaagaggtttaattggctcacggttccatatggctggggaggcctcaggaaatttgcaatcatggttgaaggcatatcttcacagggaagcaggagagagaatgagggctgagcaaagggggaagcctcttataaaaccatcagatcacatgagaactcactcataatcacaagaatagcatgggggaaatggccctcatgattcagttatctccacctagtcccactcttgacacatggggattactacaacttaagatgagatttgtatgcagacacagggccaaaccatatcaaactaccattggcattcttcacagaactggagaaaactattttaaaattcacatggaaccacagaagagccctaatagccaagacaatcctaagcaaaaagaacaaagctggaggcaccaccctacctgacttcaaactatgctacagagctacagtaatcaaaacagcatggtatgggtacaaaaacagacacatagacaaatggaagaaaatagagaactcagaaataaggtcatacacctacaactatctgatctttgaataacctgagaaaaataagcaatagggaaaggattccctattcaataaatggtgctgggatatctagctagctgtatgcagaagattaaaactggacccccttttttacatcatatacaaaaatcaactccaggtggattaaagataaatgtaaaacccaaaactataaaaaccctggaagataacctaggcaataccattcaggacatagggattggcaaagattttatgatgaagatgccaaaagcagttgcaacaaaaagaaaaattaacaaatggattctaattaaactaaacagcctctgcacagcaaaagaaactatcaacagtgtaagcggacaacctacagaatgggaggaaatgtttgcaaactatgcatctgacaaaggtctaatatcctgcatctataaggaatttaaacaaatttacaagaataaaaaacacaatcccataaataagtgggcaacggacatgaaaagacactttttgaaagaaggtatacatgaggccaacaatcatctggaaaaaaggctcattactgattcatcagagaaatgcaaatcaaaaccacaatgagacaccatcttataccagtcagaatgactattattaaaaagtaaaaaaataatagattctggcaaggttgtggagaaaaaggagcacgtatacactgctggtgagagtgtaaattagttcaaccattgcggaagatagtcaaccattgaggaagatagtgtggcgattccccgaagacttaatggttgactatcttccacaatggtctccagctccatccatgttgctgcaaaggacatgaccgtgttcatttttatggccacatagtattctgtattgtagatgcatgacatattctttatccaatttgtcattgatgggcattaaggttgatgggatccattactaggtatatacccaaaggaatataaatcattctgttacaaagatacatgaatgcatctattcattgcaacactattcacaatagcaaagacatggaatcaaccttaatgcccatcaatgacaaattggataaagaatatgtcatacaaccacaatatagaatactatgtggccataaaaaagaacaaggtcatgtcctttgcagcaacatggatgaagctggagaccattatccttaacaacctaacacagaaacaaaaaagcaaatactgcgtgttctcacttaaagtgggagctaaatgatgaggacacatggacacatagagggcaacaacacacactgggtcctattgaaagggttgcaggagggagaagatcagggaaaataattaatggatcctaggcttaatatctgggtgatgaaatactctgtacaacaaaccccatgacacaagtttacttatgtaataaacctggtcatttacccctgaatttaaaaggttttttttttttaaatattgtgcaaggtttttgggggacttgtattttaatttctcttgagcatataccttggtaattgaattgctgggttatatgctaacttcatgtttaatcattgcagaagtgacagaataattttcaaaacagttgtaccatcttacattcccatcagcaaggtacgagaattctctctctttatatcctcttcaacaattgtcattgtatatatgtgtatgtgtgcatgttttatcataaccattcttgttgtgtttccctggctagaacttccagtacactattaaatagaaatagcaagagtggatacctttggtttctttctttttttagagtgaaagcatctagtctttcaccattaaatatgatgctacctgtgggtttttcattaatgttctttatcaagttgaagaagttctcttctattcctagtttgttatgtatttttgaaaaagtatgtcatgaaaaagtattggattttgttaaatactttttctgtgatttttgagataatctttaaaaaatttttctctatggatttagtgtgatgtattgctttaactgatttttgggagttaacacagctttgaattcatgggataaatctcatttgatcatgatacacaattctttaatatgttcctggattcagtttgctagaatcttcttgaggattttatatccacgtgcataagagatactggtctgtagtttccttttcttgtgatgtctttgtctgaatttggtatcagagtgacacaggcctaaaggagttagctgggatgtgttctcttctctcctattttttggaagattttgtaaataactggtattaattcttctttaaatattgtgtattactacaataaaatggggaagccatctaggcctcaacttttatttctgggtggtttttttattgataataaatctcttcattcattatagtttattcatattatttctcttgagtcagttttgggagtttgtgtctatgattgtatccattttatttaagttatctaatttatatttcagttatggtactttgcaattatagaaggccaatgtgatttttaaaaataatttatatttctttattaatattctccatttggtgtgaaattgtcctcataccttttttgttttactttaattatggtttcctttagttctttggacatacttacaatggctactttaaaatcttctctgttaaatctaacatctgtttactctcatgggaagtttttgttaacttatttttcttagtatttttttcttttcaatgtataaattatagtttccagtttctttgcatgcctctcaatttttttttgttggaaactagacattttagataataaattatagccatttggggtaccgatttcccccactgtggggattgctattttttaggtgcttgtttacttatttagagactggctggattattttagtgacatctgtatcccacagtgttaatcctctgctcttgctcctcagagagtgcaacctttgttgtaaccatagtcacgttgggatgacagtggttttatcaggcctctctgtcgctgtttcttttcttaaacacgcttagtcttgaagctccactacttgctggctgattcttctattgtctggaaatgtcctaaggcataaggttcttagcaaactgatgtaatcaaatgtagtctcttttgggggaataattcttgaggtcagtttttgagactggatctgatcccagcagggctcttccctgttgtcacttttccccattctgacaatctgctccacagttttgcctatctctccaatgaatctcctaatttactgccaattgtctttttttgccagttgtctttttgactacactttttttttccagagccccttagacttgaacttctgcacaccctgttgcaaacaaagtctgctcctttgaaaagaaattagtaactgtctgttttaggactgctcttcctctcgggcaaaatctctagattttgccaaggctctagaactgttggtggagacagagctttcctgaagttcttttctctaagtgacaactttgtttttggaactgaatacttggtgggatggagtgggcaaaagccttaagtcttttttggtttgccttttccaacatggaaccactgccttataagccgtaatgagggcagttggggccccagtattctcagcaacaccatgcttaagacagaccttccatcccacaaatagaggctgggcagaagaagggaacccctatttctcatccacatttgcccagggcttagcctgagcaacaagtagatggtccaggataagaaatactgatattctgcccctcccaggaagataaccatctaggagctgagggatgtgggagcctatgttcttagacatgcactgtctggattggaatttctaccatgctgagctggaaagggaaatggaaggagaagattcttgttcaaataccgtagatttttgttgtcctgtcaattttagtagatttttgaataaatgttttctcattttctctatgcacttaggactatttctagagactttaaatgttttaaaacaattttcatctgtttcactgggaagctggtttatggagctcctctctgtgtcatgccaaagcagaaacatctccagtaattctaccggggctttctttatttctgagttcttcattttgctttacgccttggttgctggcatatcgtcactgaatcatttgtttctttcaagaagaattcttgaacattctctgagtttcttaatgatcaagaatatctacatagtacttttgcacttgaatgagattagacacttaaaatattcttgatatatacttttgttttatttaaaactttgtagatctgtttccattgtccttgtcattaaaggctgttttggggaagtctctttttttttctctttctacttggaagtaactttatgtttttttcctgtacctttttttctttatcctcaaaattaagtaacttattaaggatatatattaactttgactgttttgcatcctggtctatgttatgtcttttcaagctacatatgtatttattttttcttcacttaagagtacatttcccatatgtctctgaatgtattttctgatctacttatgggattctttaatttttagataccagttatccagattgaattatctgtattctttgtatctattttttgacttaacttatttcacaattctaatctggtttttgttgttaaaagaattttagatatctgactgtattttggttctccatcttttctccttagcttggcattctcccttttcatctttttatctgttgttttatcatcttctttttgaactgatgttttactccattcaaattcttattaagttctagagcacatagcacttttccagattctgctgttcttagattggattttctttacaggtggattatttgactgcttttgattttacgttacttatctttttttgtttgctttttttctattaaagaaacataactgcatcatttgtatgcttttctctttgtatttttctcaagttttcatcatcagttctgtctaggcccttgctacccatagtgcagtcttcaaaccagatatactggtgttatctggaagcttattaggaatacagaatcaaagaccccacccaagacctactgaaacagaaacggcagtttaacgaggtccccaggtgatctttatgcacattaatgtttgaaaggcactgctgaaactttattgcacattgaaataacataagggagtttaaagagtactaatgcctgagattctcacttaattgcactgagatatggcctaggcatgagaattattctaaaatgcagcaaagtgtgagaactactgacctagaccttccatttactgctaatattatgtaaatcacttctttttgtcctttttattatttcattcattttcttaatttcttcagttttgtcatctgtcccttccattctaccctcctttgtgcacacccaacaagggatattgctttctgtttattctgtaatctgcaagtgagtgttaggagggcagaggtggtaagcaaggagggaaagttagctgtaaatggtagtagtgggttcagatctttcttttgagattccattaaatgtctgacctcaccagccaaggatgcatcccacctctgtgtatgttgtccttggaaatggccagcacttacgcccatctccttggaatgctactagctttctctcttacatattgttcctttccttatcccatgactgcccatgcaacttggacctgcttctcctttagtgaacaattcttaggatttgtggactttcttttcttaatactaattttgtgggttgatgttggggccaggagtaattttaagccatttcataactgaattttccgctttgagtaattatgtctcaagattgcttaccaccctacccttttattgctgatgaatttttgctttttttccctttactttaataggggcttggttagagaggccttgcttagttttactattaatctagatgttacatggctattcacacaaactaaatttgtgttagtattttcagcaaaaacagttgacatttggggcatacattgagtagtaagctctagactctagtcagaattgctttaaatcccagccattttatatatgattctgagaagttttctatattatgtttttatgtatgctttatttttttaaatgttagtttactcaagaaatgtaggcctgttttccaatttataaataatgtatgcctgtgtatgctctgtagcaaatatgtaaaaataatctgtctttcagaaagggctacttacatatttaggagtgtttatattaatcctattttcagtgcaccagatgagctctatccaagcaccaacaattcttatttagaatttaaataacaatgtagctcattaaaaaaaaaagaattatagttaaaaaatatagctcaatgtaaggtaaagcagctaaacatactgattttttaaaagcaaagcaaattttattacacataaaattaatatatcaatatacaataagttacactgttttatcttactgtacattaattcaagaggctatttttacttttatctttaatcccacttctatttttaattatatctgtttgatattttataaattaaattgtttttagcttttggtaaagtttttctggggttagcagggtttatcagctgcatttctaatgagtaaatgtttagtaatgtatctgaggtcactgacaagacatatggaaatagatgacacgagatacttcattcattccatgttctttctaataaggtaattcattgctttaattgcatgttataatatcagcagattagataaatccttccaagtaaaagctatctttgttgtctttaaacatctccaaagtttttcacaatatgaattagctcatatatacattttaatgtatcttttttttatttttgccatcataagtctgaggtcacttgaaatttagttgcaactacaagtcagtttgaggagaattaacatcataataatactgagtcagataaatttatttagatctttagttctctcagatacgtttcatagtttctagattacggagttcaaacatctttcattgtatttattgtagttttatgtttgttacattttatttaacatgtttattaaataatatatatttgtatataataaaatatgttataaatatatttattatagttatattttattatatgttatatttgtatgtatatgtatatatgtatttgattttgtcaatgccatgtaaatgctattttaagaattttattttctaattatgatagtatataaaattatatttaatattcatatattgaccttctatcctataacctggccaagtacactattgctagtaattgctttataaattcttcaggattttctacatagataatcataccatctgacaattaaaatagttttctttaaatctcaatctttatgccttttccttctttttttttcctatggcagtggcctctagtaaaaatgtgaatagaatgatgacgtgacagaagatatccttgccttcttctcaatcttagcggaaaaaaatttaatattttgccattaactttgatgtgaacactaagaaactaaccatgtagactctgtaattagtcttttactatatttgctttatcacaaactatttagcaattcatctatgaatggatcaacccatcgttttaaaaaatatatattacaggccgaacgcggtggttcacacccgtaatcctagcactttgggaggccaaggcaggcagattgcctgaggtcgggagttcaagaccagcctggccaacatggtgaaaccccacctctactaaaaatacaaaaaaaaagctggatgtggtggcgggtgcctgtaatcccagctactcaggaggctgaggcaggagaattgcttgaacccgggcaacagagcaagacttcatctcaaaaaaaaaatatagatataacaaagtaagttacagacatctaatacctcactccaaacagctaagtgtacaaagcattaactatgtatggttcattgcttatttacagtcctcattttgtcttttgtggtaaagtctatatttaatgaaatacacaaaccggaattgtattatttcatggttttttgacaactccatacacctccatgtaatccaaactctattgtgaaagacaaaaaatgcagtggaagattaagcagatgattttatttaggctgttacaatagggaaaacattaattaatgagaaacatttcaaagaaaaggaagtgggtctagggttttacagaggtaggtaaacaaggaggtcatccacaagtcttatgagagccgtgcggaaggacagggctgggtcttacctgggaatatgcaagggaagggtggtcactggcagttagctgtgtctaggtaaataaaagtgtgtgtgtgtgttgggggattcttaaccatctctgtgttttgggaacatagggctcaggtaaagttcaacattatcagtccacacttttgtttaagaagaatattatttgttgctgtacagctcagagaagataataaacatcctgagtgtggcaaagaagggtctgagaaatagtctcagaaacaactcttgttggtgctcttcctgtataatcagttaaagtcatcttttgagaattggtggcaaaggtcagttgttttagagccccccaaatcaggcatgttttaaaaaggtatggcagaactgaaaaagagaaaatattaatataaaaggttgtattaaagaaccaggagtgagactggtggttatcagtccagtggattccaagaggtcagtggaggaaaatattttcattacacagcactgctcttgctttcaagctggaatattgatgcatttggtaaagttcacattcttatgtaggggtttgtatgacccaagcatttcactagactttctttccaggatgtattttggatcatccatcatcttctgttgtggtgagtcttttcaaggcttacatcaagtttccagaattcagctcacaagccttcttcagatcccaagtaaaagggccaaacacaaagctgcttagagccaagttagagatctggcagttggattttaggtgtctgatgatgagctagaaaggagagagaaaaatggaaaagttagtttggagacatgttgccagatactgtagaaaactggaataaatgaaaatttggtaaggacttttaagttttacaagtaacagaatccaaggcaacttactactaagtactaaaactatatttttcccatagtaggggagaagtcaattaaatctctactcaaaaagatggagtttgcctatgtatctcttacctgcaatttaaagggttgcaaaatagcacaaagacattgaacaaggcagattctgatcactcagaagagtgtgctatatatagatggttcatagttttgcattgtagtacaacacttctctacagtcaccctgcttttgatcaaaagtaatctcaaagaaaaatcattcttgatcacagaataaggcttatcacattacatttggcttgattatttacatagatgcaacaagaatggtaatttacagatgtgagggtgatctggctgcgacatctgtcacctcattgattgccagagttgattcggctgatctggctggctaggcggctgttcccttcttccctcattgctccatgtgcatccctcccaaagctgtgcattgggtggaggaggacgaacatccccaatagaggaagaccaatagagagtatacaagtagctgtgctcccctgctagaacctccaaacaagctctcaagaatggtgatttaccaggcagaccttaaatttgctttgctggaaatttttgtgaggaatttcagattggacttttaaaagcctcttaaggataggaggacaagccaaagatttgtcatctaatttcacctgtaatacctgtaagtttgcaggaatttcttcccaagatcccctcaatttcctaagtttccagagcctcctaggacatgaccttctttactcgcctgtaaggttgggaaccctgtaagtttattctatttgtgctattgtttgtttcactactttgtggctacaccatttgttgtggatcttttagggaattctaaggcaagatgtgctcttagttttgccttttatttctaatgttgatgccccaagagtgagatatcccttctgaagtgggagccttcttttgtcttgccttaaaaaaaaaaagcaccacagaagtcttttgtacttacagtgcccaagccagttgcccagacaacaacatctctactcttccccaacaacattaattttaatagagactacctgggtttgggtacttaaaacttgtgttaagaggacctgagaaaggatagaaatcaatagtctctgctgtccctgttgaataaaagcttttgatagtgctaatagctatatgaaaggcaaaaatcctcacttaaatgatcagttggccttgaaaataacaccaaatcaacataggtaatttctatttgttcattttttgcagtctttagccagaattctatccttagccggaaaatatgttagtccccacatcaaataataagcctgctataattccaaaccacttagcaaccttttctgtgtcattcaggtgtaaattagtgaatgttatgtttcctaatcagagttgctatcatgatgtattaacagggaaagctaattgaatagcagaattctttgagtgaagcagctctttcagttggcactggcttaccatatcatggcagtatttcattaaatcttcataaagtacaactttatttaaaatgtaataattgactgtcagtggaaaataagtgataggcatagtggggagtaagagaaacttctgccagtgactattctacctgctgtttttttctcacagtcagaacatctctttggtatgggagagacagaaactgaaatgtactgacctctttgtagagcttgggggtatggacctaaaggcttcagagaaacacagcacatgctgagcagcccacaaagcccccattattgctgtgtgggcaactccgtttgcatctcattgaaaatgttgtcttgcacatcaacatacgcaattaaaaaataaaagaggaaaaacatccgcctgcttgtttaagatgctcagcaaaagaagggaagcttgagatttgagagaaaagggaaggtttgtagtatcaaacttccatcctcacccccctactgaaacttgcctgtaaagctactttttaaaaagccttgaaaagaagaggagggaaaagccctgaaagaagctttcatgtctgccaaaatgtaagttcattaaccagtatataaagaaatgaaattttggttcacttgctgtaatattaacttaaaaataaattgaatacaatgtatttaatttctcatgctgttcctccagggcacaagctctgtttgtgagctcaataaatacatagtaaaaatctggaatgatagagaaatcgaaataaaagctaagaaaagttgaaaaggaatcagagaattagggaaaggaagtagactgtgtgaaaagaaaacagaggagaaattagggaatgaaacttctatgaggttttcagaagttgtatgtaaagtgttgcagtaagggaaagtatcttagatgttgccttcactctctgcctcacctcttctgcctctgcctctccagctttgtgtaactgagttccctgatgttctatcacacctccctctccagggactgttcatctcagcctcctggaccattcatatcaatcaggaagtttgatggtccactctttcagcaggtgaatttgtctatgaagataaggaatcattacctgaactccacctaatttctgctagagggcaggttctacaaacgaacctatggatgtgttctacccacctgcactgaagctgcagtttagatttactggggaaggtgagaatggatgaaaatgaagaagattacatatgctggatgcagttgactgagagtaggaaaatagacaaaggaactgttaacagaatcattgatatccaaccctggaaatgatggcagtggtggtccagtgggaagaaacaacactaacagattttgtatttggaaatagggtgtcatatttagcttcatgattgcctgcattttctgtgagcaagagatgcaatcaccttgaaaaatacaaaatacagttataatcaccacacaaatatagaatacatatgtgctgagaaaggaaaaagaataaaattaacattactagcagtcactgttagtataaggataccttatcttactgcactcactttattgcactttgcagatgttgcattttttacaaattgagggcaactctgtgttgaacaagtttatcagtgcaatttttccaacatgtgctcacttcatatctgtgtgtcacatttttggtaattgtcacaatgttttattctttttcattattattatatttgttttggtgatctgtaatcagtgatctttgatgttactattgtaattgctttggggcatcataacctgtgcccatattaggtggcaaactaattgataaaatttgtgtgtggtctgactgctccaccaacctgctattctcccttctctctctccttgggcctccctattccctgagacaaaacaattttgaatttaggccaattagtaaccctacattggcctctaagtattcaagtgataggaaaagtcatgtatctctcactttacatcgaaagttagaagtgattaagctgagtaagtaagtcctatcagaagccaagacaggccgaaagcaaggcctcttgtaccagttaatcaagtgtcgaaagcaaaggaaaaattcttgaagaaaattaaaagttctactccattgaacacatgaatgatatgaaagcgaaacatttttactgctgatattcagaaagtttcagtggtctagatagaagttcaaaccagccacagcattcccttgaaccagaatcaaatccagagcaagaccatgaatctctttgattctatgaaggctgagagaggtgaagaagctaagaagaaaagtttgaagctagcacaggttggctcatgagtattaaagaacctctgtaacataacataaaaggtctccataacataaaatgtcaaagtgaagcagcaaatgcccatggagaaacatcagcaggttatccagaagatctggctaagatcatggaagagggtggctactctaaacaacagattttcaatgcagctgaaatggctttgtattggaagaagatgtcatgttggattttcatagctagagaggagaagttcaagtctggattcaaagctttgaaggacagcccaactctcttgttagggactgatgcagctgctgactttaagttgaagccaatgctcatttgccattccaaaaaatcctaggagtctttaagaattatgctaactctgctctgtttgtgctctataaatggaaaaataaaccgtggatgacactacatctgtttactgcatggttttagcgaatattttaagactattgtgaagacctactgctcagaaaaaaagattcacttcaaaatattactgttcattgacaatgctcctagtcacccaagagctcagatggaaatgtacaaggaggttaatgttttcatgcctgctaacaaaacattcattctgtggcccatggatcaaggagtaatttcaacttataagcgttattctttagtaaataattttgtaaggatatagctgccttagacagttattcctatgaaggatctgggcaaagtaaaatgaaaaccttcgggtaaggattcaccattataaatggcataaagagcattcatgattcatgggaggaggtcaagttaccgacatcaacagatgtttcaatgaaattgattccaactctcatggatgaccttgaggggttaatacttcagtggaggaaataactgtagatgtggtggatatagcaatagaactagaattattaatagacatgaagcctgaagctgagactgaattgctgcaatttcatgatataacgttaatggatgaggagttgcttcttatgggtgagcaaagaaagtgatttcttgagatggactctactcctggtgaagatgttatgaacattgttgaaatgacaacaaaagatctagactattatgcaaatacagttaacaaagcagtggcagatttcagaagattgactccaattttgaaagaagtcatactgtgggtagaatgctatcaaattacatcacatgctacatagaaatctttcatgaaagtgagagtcaatccatgcagcaaacttcattgttgtcttatttcaagaaattggcacagccaccctggcctttagcaaatcatcaccctgatcatcaacagagaggcaaaccatcaacagagagggaagaccatctgccagcagaaagactgtgactcagtgcagactcagatggccattagcatttttagaaataaagcatttttaaattaaggtatgtatattattattattattattattattattattatttattattattattatactttaagttttagggtacatgtgcacaatgtacaggttagttacatatgtatacatgtgccatgctggtgcgctgcacctactaactcgtcatctagcattaggtatatctcccaatgctattcctcccccctccccacaccccacaacagtccccagagtgtgatgttccccttcctgtgtccatgtgttctcattgttcaattcccacctatgagtgagaatatgaggtgtttggttttttgttcttgcgatagtttactgagaatgatgatttccaatttcatccatgtccctacaaaggacatgaactcatcattttttatggctgcctagtattccatggtgtatatgtaccacattttcttaatccagtctatcattgttggacatttgggttggttccaagtctttgctattgtgaataatgccacaataaacatacgtgtgcatgtgtctttatagcagcatgatttatagtcctttgggtatatacccagtaatgggatggctgggtcaaatggtatttctagttctagatccctgaggaattgccacactgacttccacagtggttgaactagtttacagtcccaccaacagtgtaaaagtgttcctgtttctccacatcctctccagcacctgttgtttcctgacattttaatgattgccattctaactggtgtgagatggtatctcattgtggttttgatttgcatttctctgatggccagtgatggtgagcatcttttcatgtgttttttggctgcataaatgtcttcttttgagaagtgtctgttgatgtcctttgcccactttttgatggggttgtttgtttttttcttgtaaatttgtttgagttatttgtggattctggatattagccctttgtcagatgagtaggttgcgaaaattttctcccattttgtaggttgcctgttcaatctgatggtagtttcttttgctgtgcagaggctctttagtttaattagatcccatttgtcaattttggcttttgttaccattgcttttggtgttttagacatgaagtccttgcccatgcctatgtcctgaatggtaatgcctaggttttcttctagggtttttatggttttaggtctaacgtttaagtctttaatccatcttgaattgatttttgtataaggtgtaaggaagggatccagtttcagctttctacatatggctagccagttttcccagcaccatttattaaatagggaatcctttccccattgcttgtttttctcaggtttgtcagagatcagatagttgtagatatgcggcgttatttctgagggctctgttctgttccattgatctctatctctgttttggcaccagtaccatgctgttttggttactgtagccttgtagtatagtttgaagtcaggtagtgtgatgcctccagctttgttcttttggctcaggattgacttggcgatgcgcgctctttaattaccttgggcagtatggccattttcacgatattgattcttcctacccatgagcatggaatgttcttccatttgtttgtatcctcttttatttccttgagcagtggtttgtagttctccttgaagaggtccttcacatcccttgtaagttggattcctaggtattttattctctttgaagcaattgtgaatgggagttcactcatgatttggctctctgtttgtctgttattggtgtatgagaatgcttgtgatttttgtacattgattttgtatcctgagactttgctgaagttgcttatcagcttaaggagattttgggctgagacaatggggttttctagatatacaatcatgtcgtctgcaaacagggacaatttgatttcctcttttcctaattgaataccctttatttccttctcctgcctaattgccctggccagaacttccaacactatgttgaataggagtggtgagagagggcatccctgtcttgtgccagttttcaaagggaatgctttcagtttttgtccattcactatgatattggctgtgggtttgtcataggtagctcttattattttgagagacgtcccatcaatacctaatttattgagagtttttagcatgaagggttgttgaattttgtcaaaggccttttctgcatctattgagataatcatgtgttttttgtctttggttctgtttatatgctggattacatttattgatttgcatatattgaaccagccttgcatcccagggatgaagaccacttgatcatggtggataagctttttgatgtgctactggattcggtttgccagtattttattgaggatttttgcatcaatgttcatcaaggatattggtctaaaattctcttttttggttgtgtctctgcccagctttggtatcaggatgatgctggcctcataaaatgagttagggaggattccctctttttctattgattggaatagtttcagaaggaatggtaccagttcctccttgtacctctggtagaatttggctgtaaatccatctggtcctggactcttcttggttggtaagctattgattattgccacaatttcagatcctgttattggtctattcagagattcaacttcttcctggcttagtcttgggagagtgtatgtgtagaggaatttatccatttcttctagattttctagtttatttgcgtagaggtgtttgtagtattctctgatggtagtttgtatttctgtgggatcggtggtgatatcctctttatcattttttgttgtgtctatttgattcttctctctttttttctttattagtgttgctagtggtttatcaattttgttgatcctttcaaaaaaccagctcctggattcattaattttttgaagggttttttgtgtctctatttccttcagttctgctctgattttagttatttcttgccttctgctagcttttgaatgtgtttgctcttacttttctagttcttttaattatgatgttagggtgtcaattttggatctttcctgctttctcttgtggacatttagtgctacaaatttccctctacacactgctttcaatgcgtcccagagattctggtatattgtgtctttgttctcgttggtttcaaagaacatctttatttctgccttcatttcattatgtacccagttgtcattcaggagcaggttgttcagtttccatgtagttgagcggttttgagtgagattcttaatcctgagttctagtttgattgcactgtggtctgagagatagtgtgttataatttctgttcctttacatttgctgaggagagctttacttccaaatatgtggtcaattttggaataggtgtggtgtggtgctgaaaaaaatgtatattctgttgatttggggtggagagttctgtagatgtctattaggtcttcttggtgcagagctgagttcaattcctgggtatccttgttgactttctgtcttgttgatctgtctaatgttgacagtggggtgttaaagtctcccattactaatgtgtgagagtctaagtctctttgtaggtcactcaggacttgctttatgaatcttggtgctcctgtattgggtgcatatatatttaggatagttatctcttcttgttgaattgatccctttaccattatgtaatggccttctttgtctcttttgatctttgttggtttaaagtctgttttatcagagacttggattgcaacccctgcctttttttgttttccatttgcttggtagatcttcctccatccttttattttgagcctatgtgtgtctctgtacgtgagatgggtttcctgaatacagcacactgatgggtcttgactctttatccaatttgccagtctgtgtcttttaattggagcatttagtccatttacatttaaagttaatattgttatgtgtgaatttgatcctgtcgttatgatgttagctggttattttgctcgttagttgatgcagtttcttcctagtctcaatggtctttacattttggcatgattttgcagcagctggtactatttttttgatataatgtctgtgcatctaatagagcacagtataatgttaacataaattttattttcgatggaaaaccaaaatattcatgtgaatttactgcaatctttgctttgttgtaacattctggaaccaaacccacagcatttttgagatatgcccattcttattatttttcatttctttatatttccacgatacatctaaatatagatatttttatcccaattttacaaataaggatattaaagcatatataggtttaccctaattatagaactagcaagtagctgaatcaattaattcagcttagttttacactataccctatccttcctccattacaatactatactgcctggcatggaagagtaataattgtccttattactgtaaattatgtgataataatgtgcttagtatcctactctctaaacacaaagaattcatgtgtgcatatacatgtataggtactcactgaaaacaggacatttgctaattttgacataaaaattattgttaggatcattatcaactccactttgtcatgatccctaccctatccccaccaacaataaccactttaatgacttctagtagcatagatgcttttcatctgtttttgaattttgtgtaaacggatttatgcagtatgtgctctttgtgtcggcttcttttgctcaacattaggcttgtgatattaatcctgattttcacaatagaatactatacagcagggagaataaatactcacagtatcctattatattttaacacaagttatttattctactgttgatgaacatgttggtaatttttaggtgcctactatcgtgagtactgttgctacaaacactcttataagtgtattttggtaaatgagtggacacatttctgttggatatatgcctgcgagagtatgcatatattcagttttttagtatttttaaaatgtctgtgaacagtgtagactattttatttcaaagccactcaaggaaattgtacagaacagaaggtgatagcacatttgagggtcagttagtgtggggcactatactggaagcttttctggctacttttaatgtagatgatgctatgatgccttgtctgtgtctttcctttgtcattgttcctgacatcagccccaaggctcaaaccatcttttcccttttctaggtagacgcttaccagcactgttgggcagcaaagtatgctttttatgtgacctatttcccaacattctcatgccacttctctgactgctgtgccccctctctcctgccagccaagctccttcatgtcctcactctcctatcttccctgttttttcactatgatttcctgatgttgagcttaacaggggctagcatttctagagtccagagaaacttttagtcctggtttctcaaaggccagactgttggaaagcccttcacagtggtttcctttctgtcatttgagacacagtggtgtcccatattccaccccaccctcattttcctcttttttaaattcctaagccctctaaaccccaaagtggcaggacctagaatgtggttgtttggcagacacaccaggcacaatcagcagaaggaaaagtatatgcgtacatgtgtgtgtatatgttttttcactcgagcacatgccctatcctgaatcattaaatttaaacactcatggaggctgtgacaccacaagctgtttggcattgcgaactctaggcacatactgattaattggttgaattgtactttgactttccgttggaggttttggtgtttacttacagcttacatctgtctcctctcactcaattcctgccacttttctttccaaactctcattttcttttcctacaaatctcttacgttggcagctttcacattctacccgaagtggcctgaggaacacttgagacttttcgacttcagaaagagagccaggcctcatcagtagtgggtgggctgaggctcgggttgttgcctctactttcccaccatgctaagagaaatgtccagctggagacaatttgaggctacaccagaaacacagcaagcacaccagcttaacacttcttatatgtgtgagcctgtctcaaccctgtgtttaatcatagcccacctactcacccttgccacagctggcacaggcaaaccattcacagacagcaggagctgcaggctgttgcacagacagggtcctgatcacatctgctgccgctgttgcccataccttactcggataggaagtcctgggtgtataacctccatttctatttgaccttctactttaactccctttcttggtttagtgggctttggcttcctttttctgtcatcacctctacccactgcttttggttcacttgaagagccgagatcctaggaatcccacaaaactagcctttgccaccaaaagtgtctcccttacgcacaacacatccaattcaggaaggttcagacaggaatccttttttaaaaaagctctgtaagcaagaggcatatctcaaatagatcacatagtatcatagatgtgaagatgtttgaacatctgccagaagatgtgcttgaacctattgtttatatggtgacagttaaacacttgttatcactcacatcatataatttttaaaagagaaatttaaaaagtcacaaagtgtaatagaaagaacactgggttacactgaatctgcagttgtggtcatatgtcactgggcccccgtttcttaaccactaacataagtttattatgatggttgattcccaaggtcctttctaggtttttaagtccgttgtactatgagtctattagtaaatgattgtgctgcatgatctaggttgtactgtaaatttgagattccactataaattttctgaattctcttctcagttgccctagaattggaaaagaataagaccagttttctaagataattacaaaaactatgtcctagtgaatgtgctacagaattatgaaaagttctgaggcactgtctgccatggcattctattgtcggttttgcattgttttccatatcttctttttaactcaatttcttatattttctagcagaaatgggacaaggtttcttaaagtataacaaccgtgatttcctttatcattctgtgctttagaactttgcttcaggtacttttaaatgagcagacccgaaatcttgaaattaaactgccagttattagagatgatatttcatgcctcacatggggcgcatctccttttcatattgcatttgtgatagacagttccttgcatgaataatagaatggccctgaatgaattcacgtcagctctgcctcagggagaaacgcaaggtgagctccatgactcctagtgtgatcctttgcctgttgacattacttttaaacttttcttcccaagactgcagccatgtgtattaaataaatgataaacaccatttctctcacaaggctggctcaccatttgagctacagagaatgctttgcaggtagttgagaggttaatattgctgaattatttatttattctgtgtagtttaaacattcctattttctgcctttcccccactctgtctctctctctctctgtctctctgtctttctcttttttttaacctttctagtggctgattcagagtagaggaaatatataatctccagcaaggacagatcacaaagatggcctctgtctttggttgaaaagaaaaagaaaatgggtaacaaaccttgtttcttactttattggagaggagttcacagtttgtttgtttttttctttctacaagaaaacaatttgaagaatatagatgtttgaaaaaaaaaagggaaggagaaagtaataagtgaccctactacagggacagaccctgaaactgtgcagatctcctgaaacccctgttgtttatcatctgcatccagtctgctattgcatttttttgaataattcagatgaaaagtggatgaactgaacgaagacattcctgaagggtagacaacgagaagaactgcaaaaaacgtcacttactgtgaggaatgaaattgccaggtggccactccagaaatgccttgactcacttgtagaagtccttcaagcatccctaagtttgcaaatgagaaaatcattgcacaggttcccacccttttctctagtctcatttctatcctaacttcatacttcaggttatactcttcttgttaacttttactttaacaaacattacttttactaacttactaacttattactaacattttattggatattggaagattttttttaaaagcaaaggttctctgataacttttatgagtgataattaactaagaacaaccaagctaggcttatgcgccagcttaatcattccatcccatgtgttgactctatgccttattcagaatgcaggttcttaagaggacgtgtctgaactttaggactctgggttggacctgtctagccttcatggtcccttatctccttggtctctgaaaccacttgtctgacctacagagaaatgggaacctaaactctgagtagattcttccagtctacagagattctgaagccccatttcccagaatgaacttgcccagtgtgcagagggtcttagggctatatggctgacttgaactggtctggaaagttctcaaacttttggtctcagtacacctttacactcttaaaaattatgtttacaggagttctatcaatactatattagatgtcaaatttcagattataaaatatgtattgattcatttaaaacaataataaacacattaatataaacatatgtaatgtattattgtgaaaagtagctattttccgaaagaaaaatattccatgtgaagagtggcattgttttacaattttttttgcaaatttctttcatattaatatttgatttaatagaagacagctagattctaatatcttcctcttcattttaatctactgcaatatgttgtgttatgtgaagtacataaaatttggcctcccatagataggcatttggaaaagggaagacttcatgagtgacctgaaatggtcttggaggtctctagaggttctaatctctcactttgaaaacttctggtttcttagggaatatcctctagctctcaatgggccagctatcttttttgtcatctaaaccccctcccttatattcactgtcctaaccattaaagtggctgataccctatcttctgcatgaaccaatgtgacattaaagagatttaagccacctgtttcaaaaatggagctattcaacccatcaaggtgtctagtggaagacatttctagtgttctctgacatacatttctccccctcttccaagcacatggaagaatgtagctctcagactctgtgtaatgagcagggccatgtgagttaggtctgataaacaagctctagggaaacgtgtaattttaggacttaggcaatgaaaactcatatgtctgtctctcctgatgtgggaagaataaaagatctgtgtcccagatggtgcatttaagagatggtagagtccttatcagttgcatcattgagttcctgtgtacggaagagctccccaacctgcactggacatgtagtaagagcaagaaataagcctttgttaggctaaggcaatggtatgtagtggctgattagttactgcagcataacctagctcatacttaaaaatacatatagtctttgaaggaaaagaatccttaaaaagcatttataaaaccaatgctaaatctttgaatgtcagagtcctagctcatttgagcgccctagattctaataactccagctgactccacctgtttcttcacctgcccctgctgtctccattgttctaggtagctgggttccatagcagagtagaaaaaggcaaatggaagtcaaagtgatggtcttcattgttatacctcagaatcagctctgatccctatacttacacctaaattgttccacatccacaaagtaacttcccttccttcgttgctaatttttcaatgacaccagcattctctgagatcatctaagcttaaaaaatcaggggcactttgacaatttccacttattcacattcacttcattctgttcattttttctggaaaaccattggttaggccattcttgcattgctatgaagaagtgcctgagactgggtaatataaagaaaagaggtttaattggctcatggctctgcatgctttacaggaagcatggtgccggcatctccttggcttccaaggaggcctcaggaagcttatcataatggtggaagacaaagggggagatggtttttcacatgacaaaagcaggagcaaaagagagagacagagagagagagtgcagcggggtgggggcacacactttaaaatgatcagatcttttgtgaagtcagagggagagttcagtttatcaccaagggtatggcccaagccatttatgagggatctgcccccgtgatccaaacacttttacatttcaacaggagatttgggtggggacatcaattcagactatattaacaagtctcatgtctgtccattcctctcaatttctactgctgagattccatttctatcttggcttgctgcttgaaatatggccccatgtcccaaactagttaatgcaccgtcaacatttctctcacattccagtgccctgtggtggaggggaaaggtgactaactgaagatctaacctgggcagtgactatagtagttgttttgcttgctccgttttacttaatcctcacaatatctctttaaggtagatattggtaatttgattttaccaatgttgaaattaagacttggaaagtttaagaaatgtatctcagtatcacagtgctagtaaatagtggagctagaattgaaaccaaagtctggttatccctccacagaatttctataatggccttttgccattcaataaatactgaatggttaagtgagtgagttagtgaatgaatgcatgaattcatgcatgaatacatgaatgagaggagtagtgggcaaaagacttgtaatatgattttgtgcacttttgcaagcagaggtcagttacttttatggctgtagtagctgctgtcaccactgctgtgaatattccatcttcatgtctgtgaccgtccttccacctgtacactccacagcccacactcttacttaggacagccgagcacaacttaatcaactagtattgaaataattctgattgggagcatactaatgcttccttcaattagtttcctccagagttaatcccatttacttttcctgtttgggcaaccagctgtttgaggttgctgggcaacccagagttgaagggcgggagggtggagagagattgaggcccagaagcttcaaccaaggtgaagattaaatgagactcaaatgtcagagaggatttattttaaggcaccaactgattattgcaaaatgaacattgaaaaggtgagctaacacgcctgtaatcccagcactttggaaggccgaggcaggtgaatcacaaggtcaggaattcgagaccagcctaaccaacatggtgaaaccctgtctctactaaatatacaaaaattagccgggtgtggtggcctgcacctgtaatcccagctactcaggaggccaaagcaggagaatcgctcgaacctaggaggcggaggtttcagtgggccaagatcgtgccactgcactccagcctgggtgacagagcaaaactccatctcaaaaaaaaaaaaaaaaaaaaaaagaaaaggtgagctaaattcagttcagcatatttgtttttcagtatttataatcttaaggtaatctaatttttcttctgaaacagtgtagcaacaaagagcccaggggatttgattttgagtgaaaggcaaaaagtgaggcttcagggaaagcaagagtggttgtgaaatggcagctttcctctgggatggctgtgttgtttctatagaagtggattaaacaatggagtgtgttcaatcctgcagaaacttccctagcacaaagcagggggccagatattacagaaaatactaatattgtagagaggcagaaagaaaaaaatcacagaggtgggaaaatcttagggcattatgagcagacactaaagatcagagaggaaatggaatgtgagcactcagccccagccttatgcattctagatcaccatctgcaaccatgacagtcctgggagtgttgctggcggcaggctgatgcttgaggggtggggagtgcgccactgtaacttcatcctgggaggactgaaataattgctgggctcctttcagatgcactgggtgaatgtaaaaaagaagagtggttcagtaatcttaaaagtaaagaaaaacttccaggtgatcttgaggaaaaaaatgtctttctctttaaagcctctgcaatacttccgcagcatactgcctatgggacagaattatttttcatctaagaaatacaaggatacattcacatctctggtttaaggcctatacataagagaaattgaagggatcgctgtgaagctttcaacgaaagctaaaattccaaatcccactggagtcattatgccacctttggcaaatcagttactaaacccagatttgaaaataatgcaacatttttttttcctgaaactaaagtaagaatgtttcatttagcatccagtctcacattctcagagggcaattacttccaacacttccatgggaattaaactgaaatgagagaggaagagagagattgagaaactgggagatgaagaattgttcagttctgtgtaagtagaagaatgacagagctgaaagaaacagacatgttttttaataaaataataatcattgaatcattttaaaatccaaactttaaatacatataaatcatttatatatatgtatatcaccggaaatgatttatattaattactacaaatatataacatcaatttaattatatatatatatacacacacacacacatatattcaaatttagagtgacatcctttctgctacactagtgtcatatcacttatttgaacagtaactgagacatcaagatgaggcaataaaaatgaccgcagtctcgtgaatgaacactttgttagtcttctctccaatacatacagccaatatgtgggaccggaaaaacaaaaacttaaccattcgcatgggtgcatagagtaagtaaaacatttattgcatgaggttatttaagaaatttgtagccagataacagagttgtataattcaggttcctctacaaagacatggaaatagccctcttatacagaaccatttatgtgataccgtctcttgtaatgaatttctgttctggcaaatacagtctttcagtgatgtatagctaggctattccattacgtttcaggtcttcattcagagtaatagaagaaatatccacagcataatattcctcatatccaacttggatacttaatggcaggcaaattaatggagaaaaaaagcccgaagtctaagatggaaactgttggaagggctatgaaaatttgaatgatcctatttggagttcctcagtgctataagggcaaaaaggtctccttttcaatataagattactaaacatgaattgcctttgtgttcacatgttgtaactggagaagaaacttggctgatgcctgaggttgtaagtctgttatctgaatttctctacctccctccctcacgttcagaaaactgtctcaggaaaatggggacctgaggatgcagccctagaactccagcactggactctcacctgcagatggcatctaggatctgactgaaaatgatgactggagcctttaggaagcccatgttgttgtgtgtcttttactctcttcccttcctaaccagctgccttgatttgaagcatttgtctcagttttctatgggaattctagggaatgggaccatgtccttttaaactggtaccaacttcactcccagatatttctctactctgccctacatatgccactgtgttgtcccactattatctataatgctttgatttttctctctgaacctccttctagcactcatatcttcaacattattacagaaagttatttttatcatcataatgttttgataataccataacactgtgatagaccttttgttgtgtttggttatgtctatctaatctatatctgtctttagctgttctttatttctctgtctctgtctctctctctcaagtcagagtgtacaacagtaagcaaagtttggcctctgttctcgcgtgaaatcaagttaacatgctccacctgttgatatgtttgtaagagaaatctcatgtatatgcacatatgcagaatttctgctctttgcttctcaggaaatctcttttctccaatgtaggaagaacacattaaaatgaataagtcatgttatttttagaaaacagaaaagcaaataaatgtgtgaatagaatatgcactgtttctgtgcttgaaacattgaacattgaatattgattgaaaggccaccatgaactttgaaagaccactgtgttcagagaactgtgatagaaactaaaagagtataaaaagatgtgatactttcatttttgagaggtttacagtgggatgcagaaaaaaagaaacctgtaaatgtgaatggcagtgtgtttggttagtacctactggctatataaaattgcttttggatgtgtttcatgattccttataaaacgaagacttaataagtttacttggcagctgatgggcaaagttttaaaaaaaatcaaatgagttttttgttttcctttaagcagttcctggcaatgctttctttttttttatttcaaacagatgagtttttaaaacaatgattgcatttagaaccttcaagaaagcttgttaaccatggatttgatgagccgggtcctgagatctgaactgggagctagcttggtgcacacatggcagggccaaggaggtcttggatttccatgtaagggatacacagacaaataaacgtgataagggcaaacgttagccttgcaccctttgagtagcaaatcacagcgtatattgtgtagtccatgaagactggtgtcatccatcccagggcctgggtactgtgtacagggtgagcaatgacttagatggagaaaatatttatcatttgttttgatcactttttcattgcaaccacatttcctaaggaaatgggtataccagttcaaatatttgctcttcatttcatgctgcttggcagtctttgcatcctttgctctctgacttgttcgcctggctgtgcagtctgtttcccaagagtgctcttgatgagatattttgtttttatcaggaaattgatttcttgcatctttttctgagattactgaatccaatattggagtagaatgactcaattcttggaaaaatgtctaatttgggactctggtggttgatttttattttccagaggttcaaagccgaatttgagcatgttggtgggagaggcagaggagatgccttgcggcccacctggttcttccttgcatgaagctctcatcctcctccagcagtgtgcctcatcacactgggctctgggtgtatcttgcttccactggagagagcatcctgctccagtgtagcttttcactgtttccctagttctaaatcttgactgaggtttcttggtcttattctttaattccttaagcatcctggcagttccttactgggctgtctgcctttacaattgtgcgttgttgcatttttggtgagattagcctaaattcaccactcttccttggtgtcgagaggtggcttagtgccctaagctttgggttaataaaggctggactcttgagtccaggactagcacagctgtctgtactctgtgtcttcccataagagatgcaccaagcagttttattatgtgtaagggcctttgccatgatacttttgagaagggcgatgtgtatatttatatttcaccttgatgttttattcatgactgatacttgtttagtctatgatggcagtagggagtaggaaagcagtctgtgtgtctgagtctggttcatttaggtcttaaactcagaactggtttaatgcagcacgtgtatgtagttattataaacaatgatggcaggaatgcacaattttctgcaattaaaatgcccagtatattcaattcactggattttaccctgtgaccactgtgctgtttctctctatgtgaagaaatatactcaattaagtgttgcataatgtgagctttgtcagtccaaaaaattttttcaagttgcttgtggtgtcattggtatttattctgcaacgtcagcagtgcttgccggccaaatgcagagtgcaggctgtggttgaagcaacttttttttgttgttgttcacattccaacattcttaagaactgcctgaaaagaaatgttggaactgctttctaaaagtacttttcagagccgtgcactattggagaagttaagaaccttacagttccgaaggaaaaacaaaaaaaaagactgtgggaatctcttttattcctactttgtgacaatgctagtttatttaaatctctctctctcttttttttttcttggagtctttctctgtcgcccagtgcagtggtgcaatctcagctcactgcaacctctacctcccaggttcaagcgattctcctgcctcagtttcccaggtagctgggattacaggtgcgtgccaccatgcccggctaatttttgtatttttagcagagacaggatttcaacatgttggccaggctgatctcaaattcctgaccttgtgctttgcccaccttggcctcccaaagtattgggattacaggtctgagccacggtgcccagcctttaatctctttctcaaacctaagaaataaaatttaaaatgttacaaaaagcgtttccgtgttctcattttctgacttcctcctgaggtaggaaaagaataactcttgtaaataatgaaatgattctgtcttgcacagaacacaaaacaaaacattccagtgcactcttgatagcatgcctctgggtcccttcctgcaggattctccttctgtactttgcagagaccttcatttttcccctacctataattgaaaggctacctataaggtgaaatgtatacgttgtttaaatgtttattcttttcagctattggccaacaattgacaaagatggagatgagaagcaacaatcttaatatttgaaagtgttcattctctttttctctgctcagtctggaacaaaatctgaagcatttagttctcttgtgcaatatttcctttgtcctagctgcctctgaaaggaatcattaatacccttttagccttagcttagccctaggctttaacagagtagggagagccaagagaagcagaaagacaataggccggcaagagggggcatcaggtttgaagtccccgttgctcacttttcactagctgaaaggcctgtgtttattatctgcagcacatttgtcagctgtaaaacaaaggtaaatacacatacttatgtatcttatatggaagatatttgtttatattttttagtctttgttgtatctttgcaggtttaagagcatcaagtgagctcatgtattagaagttatttttgaaaattacagattagataaacataagttattaatcttatttttccaacttcagcgggagccaggattccacagtttgaaaaatggagacactctccttcaactcttcttttcctctctctaaattaacagtgggttagcatgagaagtttggtccttttcaaggcctaattttactgtgagtttataggaccaaacttctgaaagaactgtgagtagatctttagattactctcctaaagagatagcaagacctatccagagaaataaccactgtgtgtgaaggaggaaagaaagcccctatggcagggaagtggagatctttaaagcaatgatttgggaattgtatttaaaaagaaagatacagaatgttctcttatggtaatgtgaaaacttcaatgttagaattaagcacagagttaaaatgagatacaaacataatcagagttacgtttaaaatttgctttgacatatagttggccccacagttaaaagccatttagttgggagccaaaccaaatgccagaagagcttgtttctcctgaatttagctaagagatttttcttagcctttcaaactcacctgtcacaagtaggttccatttttagctccacctctgaaacattctgtgattcaggtgcccagtgctgcctccatgactagcctattgctcttctgccagctcccagagccagaaatttggtggtgctttttcttgggtacattcacagaatctcccttggcctcaaagggcccaagtgtcagttttctgatgtaatcagaatataagtcatgtatcaagtttctagtttagttaaagacttgcatttcaaattgagctcctttcctctaccttccaacccaaccccattttctttacctggttgtttatgtgtaggaatacttgctatccaatgtaggaggtcacaacagctacagacaggaataatctgatgatgggttttggagagatgaatggagaatggtgaatgtgtggatatagtaataggcctaacttcatcacagcatgcctgcttttagaaatagcagttgccaccatcttgccccctttgcaatagatatttgctttatgacattatgaaaaatcaatacaacataagtgtggcatgctgaaaattaaacagtcacaaaaacccatggctgtgtgtgcaactgagcctgtccagataaccagctgacatttatacattttcttattcattgaagcctgtgtaggtgaaacagaaaataaagcaagggggaatgttaactgaaaaacagtttatatgcctgaacatattttataacaacataaaagtgaagaaccagatacactgttttaactggggattccttcagaaagatgggatataatctggtgagcgttttatcaagatgtgaagcttgtaatagaaaaatactctttcctttagtggatgagcaaactctgccataaatattcacacaattggttaccaaatataatttagggccatgtttgaggaacattttccatatgaatatgtttcaacacctgcatctctttaaagctcactgttcagtaaggggagttggtaggcacgtggctgggtggaaaaggagagaagcaaatggaattctaaacatcatctttacatttcggtctgtaaaaaggaaaataaaatggctgtaattataacacagccctttcttccccccgcaaaacagttctcaagcccattttgagaatttctttccacttgcaaaatgaatcatcagagagaggatattttgtcttattcaagggcacacaaaccgcagccagaattccccattgcaagccagtttggtgaatagattaccatcagttgatgtatagtggaatgccgagtcagattctttgaaaaggaataaataatatattttaaaatatatatttgtcttggaatatttaggccctaaaggcataaaacatttttatgatttctcaattgctttataaaacagatgtttcgactacaaatgtctgttagtcctcagtttagtttcttgcacaggatttcagaaactctcacttaagccactgttagcaggtgatttagcactcgtcagtttgtctagccttttcatataacccgttacttttttcctctcactgtgatctgtgtgatactatttctccccccacaaaaatgttcataaagagatcatgagcataattatcaaacgacatgatgttttgcctaaaatggaaaaccttgaaggaagcatttatttactcattcgttgaatacttaattcatgtttactcaattccagacactggcccaggtgctgtggccacagcagggacttataggtttctctccgcaaataactacggttattacaaaataaggaaataaatacacaaaatgagtgtccattgtgataaacactctaaggctgactaaaatactgatgaggtagagttactaagagtgttagctaagggttcctttgtgtgatcaagggagctgctctatgaaggggtcatttaaggtgaatacaaggagccggggatggggcaatggggtgatagtttcatgcagagaggaaagccaacacaaatgagaaaagaaggaggttggcatgtttcaaggacagaaggtaaatcattgtggggctgaaatgagggatagaggagttgtggatgagtttggagatgtgaggaaggaccagaacattctgatccttatagcctgcagtaagagtttcggattttactctaaagtgtaacgtaagtaaaatgacatgatctgatttatactctaacaggatcactttaaaagggaacagttaatgactaaggcagtattggtaagtaatgggaatgatgtggtgagaagaaactcatggagatgtgaccagaagccctcctgggttagggcggagctcgcactgggaataggactgtacctgccctgccatctcctagccctgtggagctcccaggtgtggttgtcagtgaccgacttgtaacttcctaagctcagctcaatatagacaaaacaggtttgttgtcttttttttttttcttttctcattgagcatacacacctatattctaaacatcaataagggggaagtcaaaaataccaaaaacatttaggacagcttgcagcatgagtctacctacaggaaacaactgtttgatatggaataaaatggcatatagagttcccagcagtgtgacttaatgactgaattgtgtccactggatagaacattcaccccaagcctttcatagaagtcattgtgttcttattcgcccagtggtaaaatgacccattacgtctgtgcaatgctccatcaactctgttttcacatctgccctccagcaggctgcaggggtggtgagagtgccagtttacggttgtgtattaagcctcggtctcttgtctctcctcctattgcaagggcttccttagctccttctgcaataaccaactcttctgacccagctctgggcccagcttctccagcatgttgctactacttttctccttactttttgccaatttgtgaagaggataatgaagataataatattaacttatattaattgagtctttaccttgctttagacattgtgctgctttacctaaattgtctcatttattctttagggcatccctaaaggtattctccattatccccattttaatagtaaaactgagtatcagtaagactgtggcttgtccaaggccatggaataggtaaggaagcaaagaagtccggagaagagacaaggatgtaagcagaaggtgcagcgggaaggctgggatggcagatgtcaaggtgactgctgggtgggtgggcatcaggtgaacatatgggttagtctagccacagtgacatgcaaatgaatcataaatgaatcagctggtccttagagaccaaaccgacaagacacaccattgctttccaactaatcctttcaatttcctgtgttggtccacacaaactaaccagtttgggacaaaactcagtttgcttggaataatttcagtcatttaggaacctccgacctactttataagccaaatttgcctcacagcacataaccttcgaagactgtttttatctaaattaaaacaaaaatggtgctcatccaaattttcattcagtgtaattttggattccttttgggtatttacctttggcagggaaagtaaagctgatctgctcggccaataaacaacagttgtttcagcagggactgcaggagggctttcagttaaatgaagatgaacattttaaaagtaaattcagcatacatggagctacttcaaaatatggactggtaaggaaatagttaatgaggctgacataaatcagaatatgtgtattgttattcttgatgacaaactaccctgggtggaatctattaaatacacttgagtaacctacatccatcaaaaagctgtttttcccttagaagctactgtctaccagaagccatcttgcaactatagatcctgtaggtacttgatgaagtacttgtaagtacttaataagatcctgtaggtacttgatgaaaaattgcaggcacatatgtgtgagcactaaaaacaatacagaattagtgtggagaattattaaaaacatgtccattagttatcttaagaaaccctagcaattgtacagaggagccagtctcctcagctaatgactgtggggcgtatacattaacagattagcataaatttatccttgatgtagctattagttgggtgttagggagcctcagaatatttggagagtctgattaatctgagcaaacttggagaataataggatcgtcagatcactgggagcagctttgtcctgcctggtgggtgccctccgcagctcagctgctgtgctttcctcctcctcacgctgagggctttctgcagcaagtggttttaatgtctgcttttccagtcttcagggcatttcattcttggctgattgctcttgtattgtctgtagtgccaagtgaacctgggccacttgaaaacttatgaaaaagggaaatggagagttttacccattttaggtcagtataaaagaatgcagtcaagttaaaacacgtattgagtgcctgttatgtgtactgcatagtgttgagtcctgggggggtgggcagtgttgggggaggcacgatcataaatagtagaaaaaataaaaacgtgaataaaacgtgtccctgccattaagctatacacaagcttatgtcctacaatcctttttctacttatatagctaggtgctttttttaacagaacagacagatttgacattttaaaggatttcctttgaggctcccattctggtactcataggttttaatttattaatcagtaataggtgattgtttgggaacatggaaattgtggatccatttttaaagaggctcagggaacatgtggacttgcatttcccctggtcactcagcaacttttccttctgccacccatctgccttctgtgcagtccccaaaggctaggcttaggccaacacagctgttgtatgtcatgtagccaccaagctcagtccatgatgctgcatcttaaatatggtattgtctctgaccatccttgccattgccctaaaccacctgcagaggactactgcatcttattgcctgcaagaaaataattttaatactaaattctggaaatgacatgctactcacttgcttcctccatggaaaaattatatcttgagatacaaggacaggcagcatagactgtgggtatagaatgtggctggggctgcatgaaaagaaaagttattgggagctagacaaaatggagttcgagttcttgtctttggcaaaattgctgtctctttctaggccttcatttcccgtttttaggtggttggagtcagcgatttctaagacacaaattgaacattcagtggctccatgattcaagtcagcaaaggtcagaaaggcaaatagtgtaaatagtgacagctagatctccattcccctcaagagtgaacatgcatcaggaaatgctagagggagcagaggctcctcagtctatgccatccagactatctactgtcagaaactagacatacagaatctctagtgttggggcatctggggcttaacaccaggataagagatggacttgaggctcatcagaaatggagcagaagcgacaacaggtagctactgctcttccctccaccttggctgtttgtgaagaggcaggtggccctgaaggtccctaggcagatgtccagctgccctgggggaagcctgattttgagtgttgctgctcacctgatctaagctcattgctgcctttagcaggaagcaggagctctggctgctgggccacagcctttctctgcactgacagctgctgctgccactctctgccaggtgattttccctcttagcaacagctgtgagagggaggaaacgagacgggcagtgaccatagggcaattctcttaaaaatagctccagggtttgtgccacagcatactgatttggcctttgggtggatttaatttgcatggcgagttcaagagtcccccaaactctgaaggagagaaaagcagcaatatttatttgggtcaaatgcaatatataagactaacctgtgtagaaaatattttaaaatctaggcttttattcagagactagaggaagtagaaagcaagtgaaagaaaaaagttgacaatcacaaaaacagcaacaacagtaacaaccaagtaaatgctgaatatgcaccagccccatgttagcccctactgcatacagtttatccccttaattcttgtaaaatccctgaaaggttaaagaaactgaggctcagagtggttagttaatttgctccaatttacacattatgagaatgtgtcctaggtgctgtgattgacttaattcttccactatttcgttctttttaagatcctatagtcgtttgctgcccttttagggttatattatcctagaaaatagtttttattctaataattgtccatatgtaagcccttttctgtctcttgcaagttttgcagtgactaatgcaaacttttcttatacaatttagatcagatcctgaaaaatgaaaaaagaaaagcaaaaaacaagagaaaagcatactaactgtgggaagcagaataatgttcccaaaatatgtccacatcttaatccacagaacctataaatatgttgccctacatggaatgagggactttgcagatgtgattaagtagggatttggaggatattctggatgagtgggtgggtccatgtaattttaaggatttttaccagcagagaagggaaagggaagagagtcaccagtgagagaaggggatgtgattacagaagcaacgctagagagatacagtaggagaaggattcaacttgtcttcgacagatttgaagatgaaggaagaaggcaatgaacaaagggatgggggtagcctctggaagcaggaaaaagcaagaaaatggatcctacagaaagtaatgtggccctgtcaatggagcttgattttagcttggagagacccatgttatacttctgaactacagagctgtaagagactacattggtgttttaagccactgatacatggtaatttattatagcagccacagaaaggtaggtagtacactaaccaagaataggcagtgtaatttaccagaagaattcatggcgaggacacaccactctgctaactgagctggacttgggcctatgctggttgtttcagggcagactgaagattctgatttaatttgtcttacttctccagatacatgtgagaaatagccttttcttttagaataagggagaacaggagcaaaagtatgcctaacaagatgtctaaagatacgtagaaacagaccttcatcaccgccttgttccccaaaagtctaagacaactggtgaacttgtggaaatattgaaagcacatttcttgacaaaacaatctgatattatgcataggtttcactttcgaggtaggtgttggtgcctgtatggcaacgacttggatgctacatttctaaaggtttctcatgatctctgcatttactgttccagtttctggaatgttctttcccatgacttttacatggtttacttcctcacttcttcaagtctttgcctaaacatcaccttcgtagtggggctcctcctcatcaacctatttaaaatcatgcaccgtttcttgttttgccttcctctgtggatcaccattggatgtagtaaatgtctgacattaattttcttggctacttctgtcctcccattaaaatatatgttttatatgggcaggattttcatctgtttggtttgctgaggtatttccagcagtgtctggcatttagtggaaattcattctatatttattgagtgaataaagaattgttagacttggagggagtgttggtgaagtgtaaaccttccacgaatgatgacaccagtatataagtttatactcagtgttgatcatggcactatttcttcagttccaggaaaggccagtcagttctaggaaggccaaataatgaggctctgaactgtgcttatgcctgagagctcagattagattttgctgcctctcctgatgacaaaataagtttcccaccctctcccagatctgcctctcaccccttcatcactgtctagtcagaacacacggataactacataggttacaaggctgatcaaatgtggagggtgttacatttaaatacaccatcttagggattcagattagttagagtgttttagcatgagttttataccattatgcatacattttttctccagaaaggggttgtcatgttatcttagttatactataagtagcacctctggtaattctgtgtataaaagtttcttagccgggcacagtggctcacacctgtaatcccagcactttgggaggccaaggtgggagttcaagaccagcctggccaacatagtgaaaccctatctctactgaaaatacaaaaaaattagcctggcatggtggcgggtccctgtaacccaagctactcaggagtctgaggcagaagaattgcttaaacctgggaggcggaggatgcagtgagctgagatcatgccactgcactccagcctgagccttctaactaaaaaaaaaaaaaaaaaaaaaaaaaaaaaaaaaaaattctcttagtgtaaaggcacctattctttcataaaaaggagtcagaaaacagacacaaagaaataaaaatgaccacaagcactttagtattggtaaaactactccaggtcttgtccgtattaggaatgtcccaagatgatccaaaatattccaaatttcatttaaactgttgctacacaagttaatatttcttatatacccattacttgtaaaactcaaattgctagaaagtctcttgttctgaggattgatgtatatttttttcctaaattgcattgagttgaaattatgaacaagattcttatctgagctaccacctcacataggctgctgtggtgactaacagtggactgattatgtgaaatgggaggaaatttgcctacaagacctgccaagtttgcaatcactcaaatatattcaacaacaatattcagtcctcctgaattattaatgaagcaaagctgaaagactcaccctgaccatctctattcatacttagatgagaatttattagggaaacaaaagtatatgctgagtgttgttatattagcacctgtttttcatttatgtcttctgtaaagattagaaataatcatctgggtttcttattaaaaacgtaagttcacgggcctctctccagatcaactaaatcaaattatctaagagtagggcccagagaatctacacttttaaacaaggtttccaggtgattattatgtcttttaaaatttggccaactgacttagaatatagtgtgactctcttccactataattactctccttgggttggtgactggtgagtagatggagtggtgtggcattgtcatgttactgagtgtggcccatgggatgacctggtgatcacgaaatgattaggaatatctatagagcaatgtggcattgactatttagctccatctcctgagctgaaccaaagctcctttgtgaaaaaagccatgatcccttatggccattgccctagaattagcaccatctggaaaaagagagcaagaagagcattcctttccttggttaccagactgtgttcactaaaaataaggctgttttctattgtagaatgctataactcagagctgcttgttttgtctcatctaaatttttgcatttttatactacagtcaattaagtagaattagtttaaggtagtatttttttcttctgaagcacatgttaatgaagaatgtccctatcttgccaattgtgctgtcatacagtgaaaaatcattgcatgttctgaccttttctgaccacatggcagttctggcttttggaccacaggccaggatacttctgtgaaggttgagatgccagcaaggcagccaagataagttcttcacccacaaagtagatcttctcatattggccagagcctcctttgatccaggccttcacagattttacattctcagtgctagcacctgctattggccttctttcctactttgtatcacaataaataataagaggtttattggtaactcatcttttttttttctttttttctttttgagatggagtcttgctccgttgccaggctagagtgcagtggcacgattttggctcactgcaatctctgcctcctgggttcaagtgattctcctgtctcagcctccccagtagctgggactacaggcacacaccaccatgcccaactaatttttttgtattttttagtagagatggagtttcaccatgttggccaggatggtctcgatgtcttgaccttgtgatctgcccacctcggcctcccaaattgctgggattacaggtatgagccaccgcgcctggcccaatggtaactcatcttctagctggctctggtattaaggggctttgcaaggaatttttttctttcctcttttataatgttttaattacagaattaatatgtattcattgtgaaaataaatagaaaatacagttaaaagcaagtaaacataagttgatggccaggcatggtggcttatgcctgtaatcccagcactttgagaggctgaggcgggcagatcacctgaggtcagcagttcaagaccagcctggccaacatggcaaaaccctgtctctactaaaagtacaaacaggtgtggtggcacatgcctgtaatcccagctactcaggaggctgaggcaggagaatcacttgaacctgggcagtggagtttgcagtgagccaagatcgtgccactgcactccatcttgggccacatagtgagactctgtctcaaaataaagtaaaataaaaccatatattgatacaaataaacaatgaggtcaatcataatcttaccaagtagaggtatcactaacattttcatttctaacaaattatatacatatccttcttagtataatttttagaagatatgcaactcttcaactcaatataggtatgtgtatcttcattttgaaaaatgatgttttttgacaaagcagcttatatatgtgcgtatgccactttgctagtggcagtgtattttagtatttaagtacacaagcataacattatagtttttacatacacaacccaaatgcctgtgtttgaatcctggtttcacctaaggtagtaatttaaattctctgtgcatcatttcctcatctgtttaatggggataataatagcatttatcttattgggctgttgtgaggattaatgagataatcaattttctgttaatcacttagaataatgctttacacatagagaacagtcaataaaatgttatctgttactattaacaaattccttgttgttactgcacattcatattaaagagtttattaactgcaaatttatgatatcatttgggcaaaccaaacctcttagaattagtctcgtcacttttttgctaggagctgaaaaaccatcaaatgacagggaacctggaaaaagattaaaaatggaaacacacttgaaggatgagtggtgatgaaattggtggtaattctcagatttttctttgtcttgacaggtccttcttttttcaggcctaaggaaaaatatgaattttctcagcccaattaacagatgatttttacctaatttctgcaggaagctcacagatgtactaatctttgagcttagtacatctcattacctttggtaatggccagatttcagaacataaagtggggaattcagtgaccatcactaggagcagtgttcattctaggctactgtctgatatcagctgaagttggttaaagggggatacaatgaggaaaagagagcaattttaatggttttcgtctatatcttcccttcattttctaaatgtcttttagtttccttgcaaatgaaatacaatgactgactgttacttgcagaatagcaattatagtaattatgcttcattacttaaaaccgtattctcaaagatatttacgagaattacataaaagagatctgtatgccatgacatacttgtttgatcagagtgtattttgtttaccaatttaatcaagaatcttatgatgcacagagaaattctggtgattttttacatgtttgttgcctgcaaaaatttcagaatttggcctggctattttttttttttttacagatagttgagaggtaagtcacttgacactaagtctgtacatttcagggtatattttataaaaaaggaagcatcttctagtatttaaaagaacagtcttccaatatttaagtagtggcccaactgtagccttttttctctggtgtacatattctacataggtgaaaagaccctctgttcaaattccagctctgccacatagttgccacatggccattgtatgttgttggataaattacccttctttccaggcctcagtttccttatatgccaaatgggaatgggccatctagaagttaaatgagaataatatatactgcatctggcataacttcaggtatatagtaaacattcaataaacattaaggcattacccttccttatctttggagtattaaagtattatactttacctataatctctaaaataagtgaagatttgagtagaaccttcttaagtaagccaagaaaatccccttgaaatcttcagaacgaatcccgtaagacacagataggtccaaaggctctttggcagaagagtttctcagagaaacctttggaaaaatggcccaatgctcttacagaacaaggttgacaatgccgtgaagagttgtgttgagctcttcatgcatctctgtaaaagaactataatgatcactgacagaaagttgaaataaaaatgttgcccatttcacctgtaactttagaaggagggttcatgggagaaattacatgagtgctaactcatctctcttaggttggaactattttggacagtagctaaaatcaaataagtgaagctactctagttacttaaaagttctacaactaacccatttgaacatttttattttcttttctgtcagttattgatttggcatcatatggagtaaacaaagttaaaacacacagctgccaagtctcttaacatcttccaaggtgaacacttaagttgcgcctccattactgtaagattgacatttatttttagagatgtgcttataattagaaagtgcagatattccttggcttacaataggagtatatcccaatgaacccactgtacatttaaaataagttgaaaatacatttaatacagtagtcccccccatcagtggttttgcttttcacagtttcagtttccccatgtcaatcaccatttggaaatattaaatggaaattccagaaataaacaattaatgtttaaaatttcacactattctgagtagcgtgatgaaatctcatgctgtcctccatcctgttctgtcccacctgggatgtgaatcttccttttgtccattgtatccttgctgtggacattgccttagtcacttagccatcatctggaatatctgatcaactgttggggtatcacagtgattgtgttcaagtaaccctcattttacttaataatggtcccaatgcacaagagtagtgatactggaaatttggaaatgccgaagagaagccataaagtgcttcctttatgggaaaaggtgaaaactctcaatttaacatggaaaagacacagtgtatttaggatgttttactatccatggttttgtctatctactaggggtcttggaacatatgaacatattgcccttgtgtaaggggaactactgtacacctgacatactgtacatcttagcttaacctagcctaccttaagcatgctcagaacacttatattagcctacagcgggcaaactcatctaacacaaagtctattttataataaagcgttgaatatctcatgtaatttattgactactgtactgaatgggaaaacaatggttggatgagtactcaaagtatgctttctacagaatgtgtactgctttcacaccatggtaaagtaaagaaaccctaagttgaaccattgttaagttggggactgtctggatatcattcttgaggagaaagtagggccatacttctcagaagatggccttgactgactgtacaagaaaagggaacatggttcatcttctcactcattttcagctttctcactataaattctaaatttctggttctgtgtggtgtgagaaagattcttgtgaacaagtcttttcaggtttgtggcaggtggaaaagatagatgaattgcatctttttcatgtggtaagtgtttactcagcaccaacaaaactacatgcccaacacttagcgatgaaagggctgtaagctcagcttgggtttagaaaccatatgccccatcatataatgaactgaaagataaaagcagccaatttcagaggctgtgggatggggcaggagctgtggtgctaataatgggaaagatgttagatttctagtccaggttgttttaagctattgtttgtgtttgtagagtagatatgacttattttaaatagtcattacttatttgcaatgagccaattgctcttttcacatttgttcccatggtttattcaacttgtaggctactttggaggagtttataaagtcctgaagaaatttcatggggacaaaattaatgctgtcaatatattcaaatatagttcatgttttttttaacttaaacttaagtaccttttatatagtgatagtgttattgttatggatatctgggtactagaaatttttgtctcgcttaattctcacaacagtcatatgaaggaaggagtattttctatatattatctatgagaaaactacagccatatacagctctttccaaatgttacactatatcatagtctatgggagtactcaggtaaaacagaaggaaagaaatatctgagtattatctgcaaaaagtagacatgtaagttctagttccttcgttgtgccgtttcttaacaaattcatgcaagatttatggtcatagcttaacacaggatttcttgtttgattaggatcaattatatactgcctaaattcttggccaaaactgaacaaaagtacaacacaattcatacttggtaggtaaaattccaaactaagcctgatattacttcaatttggaatttcaatcaaagctcgatcattaaagcctcattgtcctcctactgcctgttcaagatattttatcaacagaacgtgagacagatcaacccaaggagactgacttttgttgcatctttctacacatgcagttacttgatatgtttatttaggcagcaagaaggatgcattatatgctctcttccataaaagtttacataggtagagtaggattcggttgcccatacactcaaattgagaccctttgtgagagctcacatcaggttttcttttaaggattcaggagttattaatgtaattgctatctcagagacacagcagtcattttaatacccttatttgtcaagtgttttcacctcttgattcttgaatataatctactttggagccaacaggggatcatgggaggacattgaatgtaatgcccgccagaggggttatgtggattttttttacatatattttgatatattcagttccagaatcaggtcattttgtagattagcagagtgatatttaccctgaagtaaagggtgtatttccatttctttcacaaattaaaagttatcttttgcatttgaaaattttagatttgaaaatctttttactttaactttgggtctcattaaaattacagaagcaggaatgaaaaaaaaatctatatatagctttttcttccacacagcagttaacaacaaaagtcaaggagtaccctaggctgttcatatttcgtccttgcctatgggaaatctctttcggtgagttttatcctgtgtctacatgaggcaaaccaaatgtctgtagcagctaaaagccacgggaggcagttcctggcaattggtcttaattatggagctatcttcagtgaccttgccatttcctgaagctctgtgtaaggagactttccagtttgccatcttcagcagtttttatccagtatagcaccttactggtattagctagggcagaggcaaggtatggcttcacttctctggtgcctcagctctgactgtgatgttggcctgaccaccccagtgatgggctaaggtttaaattgcagttgcaattgacagtattcatttttgcttaggcgtctttctagggtttttttttttttccccattaccattgtcctcacctaaaacacttcattttgctgctggatgacagcgatagctccttctgtctttttgtgtttagtctcttcctgtctccatcatgtgaacttacagttcttcctaaaacagtgttctcactctgatactgcccttcctagttgctctgtgtattccactgcatatatgattgagcataatctttccttattctctataattgaattcctttctttttacatgtttatctttatgcacatctgctccagtcgggctgttttcctcgccatgatctgtcaaaatgataattagtcatgtctttatggattctgccttctcagtttcttgtgttaatccctgaagaacctccagacatgtgcctggactgtgcttgcttcccctctttacattcttaaccttgccacaatgttaagggtggagtctttagatcagcgctatccaacagaaacacaacacaagctgcataggtcattacgtgtgcaattttaacttctctaatatctatattaaaaagataaattaaaacaggagaacataatttaaacaatatttttatataacccagtatatctagtgtattatttaaatgtatactcagtataaaaattattagtgtgatattttacttttgtttataaatccaaagactttttttataaggtatatttatatacttatagcacatctcaattcagattagtcacatttcaagtactcagttgccacatgggattggacagcagaactttagaccattttaggccaaatattttcccctttttatagactttattttttagagcagttttaggttcacagcaaaattggtaggaaatacagagatttcccatgtacccccagccccacacatgcatagcctcccccattgtcaacatctccacaagaatggtatgtttgtttcagctgatgaatcttcattgacacatcataattgcccaaacttcatagtttatgttaggtttctctgtgctaccgtacattctgtgggtttggagaaatgtatatgggcatttatttatagtgtcatacagggtattttcattgccctaaaaatcttctgtgctttgcctttttatccttctctccacctttacctgatggtgaccactgatctttttactgtctccatagttttgccttttccaaatgtcatatagtaagaatcatacggtatgtaaccttttcacattggcttctttcatttagtaatatgcatttaagcttcctccatgtattttcatagcttgatagctattttttagtgctgaatattattctattatttggatatactatagtttatgtatccatttacctattgaaggatatcttggttgcttccaagttttagcaattatgtttgtttgtttatttgtttatttaaagccagtgtctctctctgttgcctaggctggagtgcagtgacaccatcatagctcattgtaacatcaaattcctgggctcaagcagtcctcccacctcagccttccgtgtagctgatactaaaggcgaacaccaccatactcagctaaaaactagctgagtatagtgagacagtgctgctgtgttgtgcaggctgctctcaaactcttggcttcaagcaatcttcctgccttggcctctcaaaatgctgggattataggtgcaagccaccatgccaggcccaaattctggcgtttatgaataaagatactataaacatccttgttcaggtttatgtgtagacttaagttttcagctcttttgggtaaatagcaagaaatgtgattgctggtttgtatagtaagaatatatttggtttggtaagaaactgtcaaactgtctttcaaagtggctgtacattttttatttccactagcaatgaatgacagtttctgctgctccatatgcttttcagtgtttggtgtttttagtgttccagattttggtcattctaataggtgtgtagtgttatataatcttaattttcctttatctgatgacatatgatgtggaacttcttttcatatgattatttgctagctatatgtcttctttggtgagttgtctgctaagatctttgggccattttttaattgagttgcatgttttcctattagtgttaagaattctttgtagaccgggcgcggtggctcacgcctgtaatcccagcactttgggaggccgaggcgggcggatcacgaggtcaggagatcgagaccatcctggctaaaacggtgaaaccccgtctctactaaaaatacaaaaaattagccgggcgtagtggcgggcgcctgtagtcccagctacttgggaggctgaggcaggagaatggcgtgaacccgggaggcggagcttgcagtgagccgagatcccgccactgcactccagcctgggcgacagagcgagactccatctcaaaaaaaaaaaaaaaaaaaaagaattctttgtatattttgggtaacagggtaacagtttttaatcagatacttcttttgcaaatattttcttccagcctgtggcttgtctttgcagtctctggacatggactttcatagagcagacatttttaattttaatgaagtgccaattatcaattattatctcatggatcctgcctttggtgttgtatctaaacagtcatcatcaaacccaaatcatctaggttttcttttttttttttttttttttttttttttttttttgagacggagtctcgctctgtggcccaggcgagagtgcagtggcgcaatctcggctcactgcaagctccgcctcccgggttcacaccattctcctgcctcagcctcccgagtagctgggactacaggcgcccgccatcacgcccggctaatttttttgtatttttagtagagacggggtttcaccgtgttagccaggatggtctcgatctcctgacctcgtgatccgcctgcctcggcctcccaaagtgctgggattacaagcgtgagccaccgcgcccggccctaggttttcttaagtgttattttctaggagttttataattttacattttatatgcagattatgtttgcattttttacattttgcattttgagttaattcttgtaaaaggtgtaagatttgtgtctagattcatttattttgcatgtggatgtccagttgtttcagcaccgtttgttgaacagactatctttgctccactgtattgcctttgctcttttgtcaaagaccagctgactacatttacgggggtctatttctggactctctatcctcttccattaatctatttgtctgttctttcaccaataccacactgtcttcatgattgtatctttttacagtaagtctagaagttggtcggtgtaagtcctccaattttgttcttttccttcaatattatgttgtttattctgggtcttttgcctctccatataaactttataattagtttgtcaacatctacaaaataacttgaagggatttttattgggtttgtgtttaatctgtagatcaagttgggaataactgacatcttgataatactgagtctttctgtccttgaatatttctctattcatttagttcttttttgacttagtatgagagtttttagttttactcttatagatcttgtatatattttgttagatttttacctaggtatttcattttggagggtgctcatttaaatagtattgcatttttaattttaaatttcacattcattgctgatatataggagaataatcgacttttgtatattagcctgtctcctgaaaccttcctgtatccttagtatgatagcttattagtttcgagagggtttttttttgtgtgtgtgtctactcttttggattttctacatatatgatcatggcatctgtaaacaaggacagttttatttcttgcttcccaatcagtatgccatttatttccttttttttgagacagaatcttgttctgtcacccaggctggagtgcagtagtgtgatctctgctcactgcaacctccacctcctgggttcaagcaattctcctgcctcagcctcctgagtagctgggattacaggcacccgccaccacgcctagctaattgtatatttttattggagacagggtttcaccatgttggccaggctggtctcgaactcctgacctcaggtgatccacctgcctcggcctcccaaagtgctgggattacatgcttgagccactgcaactggcctccttttcttatcttattgcctgagctactacttccagtatagtgtttaaaagcagtagtgagaggggacatcttgccttgttcctcatcttagtgggaaggctttaagtttctcacaattaagtatgatgttagctgtaggatttttttggggggggttttgtagattttcattatcaagttgaggaagttctctattccaggtttattgagaggttttttttttttttatcataaatggttattggatgttgccaatttttttttctctatctgctgatatggtcattgatttcttttttagcttggtgatgtgtaggtcacattgattgattttcagatgttgaaattggaccaaccttgcatagttaggataaatctcacttggttgtggttggtttttatacattgttggattctatttgttaatattttgttgaagtttttgcattcatgtttataagagatattagtctgtatttttcttttcttgtaacatcttcggtttggggacaaaggataatgctggcctcatataacatgtttaggaagtagaccctctgctctaagttttgaaagagattgcagagaattggtatgaattctttcttaaacacttggtagaattcactagtgaatctgtctgggctgggtgctttctgttttgcaaggttattagttaatcaatttctttatagatataggcctgtatgattgtctattttttcttgtgcaagttttggcgaattgtgtctttcaaagaactggcccattttatctaagttaccaaatttgtgggcatgaagttgttcatagtattcctttattattcttttaatgtctttgggactggagttatggcccctctttcatttttgatatagtaatttatgatgtctctctccctctattttcttttccagtttgtctggctggaagcttgtcttttttactgatcttttcaaagaactagcattttgttttgttttctgttgcctgttagatcaattaagaataagaaaaataatgtttttaattctactttcacttatccttctctagtggtcttcctttctttatgtagattcacattttcaatctatatcattttgttttactctgaagaacttttagcatttcttacaaggcaggtctactgggaaaaagttccatccatttttgtttaagtttttatttctcttacacttttgaagaataattttgcagggtacagaattctaaggtggttagtcccccactcccaactcaatactgtaaatatttccttccattctcgtattgctcgcatggtttctgagaagtcagatatgattcttatctttgttactttaagggtaaggtgttttttctctctggctactttcaaaattttttctttatctttgtttttctgtagtttgaaatgtatctgcccaggtgtagtgttttaggcacttatgttgtttgcttttctccgagcttttgggatctataattttgagtttgtcattaattggagaaattctcatccttatttttgtcacatatttcttctgttcttttgtttttttcttcccctttggcattcccactttctgcttatgttactcttattacatttgtcccacagttctttttttttttttttttagaaattatgcacatctttattttaatatttacttcccgattggccttcaaaacatcttgacagttggccccttcccctgacccacatactaggcttatattttattttttgaattaatttaaatgaggtaggcataaattttggatactgaatttttaccttttatagaagttgcgaatattttttcccactttaaactttttttttaaatttttcttttttttaaaatttattattattatactttaagttttagggtacatgtgcacaatgtgcaggttagttacatatgtatacatgtgccatgctggtgtgctgtacccactaactcgtcatctagcattaggtatatctcccagtgctatccctcccccctccccccaccccacaacagtccccagagtgtgatgttccccttcgtgtgtccatgtgttctcattgttcaattcccacctataagtgagaatatgcgatgtttggttttttgttcttgcgatagtttactgagaatgatgatttccaatttcatttatgtccctacaaaggacatgaactcatcattttttatggctgcatagtattccatggtgtatatgtgccacattttcttaatccagtctatcattgttggacatttgggttggttccaagtctttgctattgtgaataatgccgcaataaacatacatgtgcatgtgtctttatagcagcatgatttatagtcctttgggtatatacccagtaatgggatggctgggtcaaatggtatttctagttctagatccctgaggaatcgccacactgacttccacaatggttgaactagtttacagtcccaccaacagtgtaaaagtgttcctatttctccacatcctctccagcacctgttgtttcctgacattttaatgattgccattctaactggtgtgagatggtatctcattgtgtcccacagttctttgatacagttttcttttcttttcttttttttcagttttatttctctttgcttttcagtttttcaagtttctgtcaacatatcctcaagctcaaagattgtttcgtcagccatgtccagcctactagtaagcccctagaaggagtttcattttggttctttcttaagatttccatctctctgcttacattgattgtaagttcttgaatgttgtctactttattcattgaagcccttagcatattaatcatagttgttttaaattcccagtcttataattcaaacatttctgctgtatcccattcttgtgtttgctctgcctcttcatgttgtgttttttgccattttgtattccttgtaatattttcttgatagctggacattttggacttggtaaatggacagctgtaagtaggcttttattggtggtaagatgtgggtggaggactctatagtcctataagtaggtctcaatctttaatgaatacattggtctctagactgtgaactgcacaagtatttctcaggttttgtttttctccccccaccccagggagaaaaaaacaggatggggtggaatagccagagtgtgccggtgttggatatttccctccccccatttcaggtaggctctgataaaaccccagcaggttagcttcgggttaattcgtttctcctgtgggcacaccttattaagaagaacagagtgctctggtgtatttcaaaatggttccctttctcgtcttcctgcttgaagcatgaggggattattttttaatatttactatagaaacctggttgagctcatgcaggtaaatctcacaatattgttccccacctgtgcctatgacaagttccctggagtttttaactttcaaaattgtccacactgagcttttggcaattcatcaattacagtttgggtttcctacttgtcactggttcccagggcactttccacctgtgagtctctaagtcacaactccctgtattcacctatttgtgtctcctgtcttgaagtcagtgctttgtcctgtgccctcctctctcttgaggatctttaaaaacatatgttcacctctttctttgttgttaggacagagtggtatctttcaagctccttacaccagaaaccaaagccctcaaactttttattccctctgcctttctgttgcctgtctctgactgctcagtggatatctctgtagggatgctcaacagtcttcttcagcttatcatatccaaggagacctcatgagcttcttctctgcattcctcactacagcaccatcctcttggtacccctggctagagaccttagaatcagtgttcagattctctctctattgtaaagagtctgtcattaagatataatagtgttctgattttgttttgcctattgtccctgttccttattttatcagtgcagcaacaaaatttgtgtcacccaatttcactttatatgcagtgattccacattacctgtttttaaagctttagctccccaacatgttagaaagatcatcttgccctggtcctgttagcttttccagctgtaacttctgcccccttctccctatgcaccatatactacagatgtccacatgttttgtaactcctcataccttacctctttcatgctttactaacttaatgcatgccattctttaggcctgcaatgccctttctcctgtccttttgaaaataatttcactttatccattaggcttaaacattacctcctctccagagtctccctcttccatgcaggaagaaatcaagtgtctcctattttgttttagcactttaccacctgtattgcttgtattcctttcctaactctccagcccgccccccaccttagatttatgtattccttgagagtagagagagtaagtgttcacctttgtatttctatcatcaagcactgcctgttacctggatagcagtgattcaatacctgggtgttcactgtgctgctgattggcttattgacctcactatgtagcttgatacttatatacactgtgattactttagaaatattttttccctctatgtaagctacttcataacagggctctatctctttattactcatgcagtattaaccagataaaaattaatatgaaatatatatatgtacatccctggtttcatccacttggttcaaccaagggaagcccatcttcctggtaaagagtatctggtacagtcaagggattcccgtctgtgtggtctctgcctttcactaaatcatgtgcgacagaactgagtattatccaagttgcagactttggatcttccccagaaaggaacacagtgactaatatgaaatattttatttggacactttagatatagataatgaatacacgtatttcattggccatcctttatcaatatttattgtttgtctacagagtgaaaaaatgtggacattaaccacaatctcagagtcaaaaataagaggtcaatgtctgttataatttttttaatttccatgaagaaatgatatgtaagttacgttttttgtcatcattttaattagaagaatatgtacattttttatattccacataagaaatgatcccatagtacagataatatacatttgaagaagtgttagttctttatgaggaaaaacttatttttacctttcagtataaggagatataagcatgtatagttgtttcatgttacttatattaatcaccacatatttacatgtctaaaacttctttagctactggttatttttattatgatgatagttacagagagtggctacctaccatttcagtcctgttctattgggctattttttaaatgcttaataaaacaatctttctcctactctgctactccccagagagctggaaagccccttcctgattggaggacatcattaaaaacagtggggggcactatcagtttatcaatttagcacttttgattgtgaaaagtctcttttagccattttgttgatatttagggtaagtctatgcttagataaaatagaaaactgtatttgaagacttgaaagctcctttgacatctattgaataagactccaacccagaaggcaggcggatggcaattttcccccattttaaaaagctttattttaaaataatgttatgcttattggaaagttgcaaaaatagtacagagatttcactaaatatactcttcactcattttcccctaatactaggaaattaactttggaaaaatactattaacgaaacttcatatcttattagcgttcactagttatttttttttttttttgcctaatgtcatttttcaattctagaatctgatccaggatcttatactgttgtttctttagtctgtcccaataatttgtgacagttcctatttcttccatgtcttttatgatcttgatacctttaatgagttcttgccagatattttgtacaatatctatcaatttaggtttttcaggtactttctcatcattagattgatgttatacacttttggtgagggataccacagaagtaatgttgcagtcttctcagcgaatcatatcggggatacatgatggctatacatatgtattgttactggtgacattaaccttgatcacttggttaagataatgtcttctgggtttctccactgtgaagggcctatttttctatttctcattgataaatatcttgggggagatactttcagttaatgttaacatcctatttctcctcaaaaatttgaagtgattttagtgttaattggtggatgttgccagcaactgtgatatttcccaaatggtgattttgtatttccctcggatggcaattatttttgtgttttccttccctaagagaacatatttctatgtatacctagattccaagggaaaagtctaattaaaagttgatgtatttgcaaaatttgttaccgcataaattttttaaacctgctcattttagtctcttagtctttgtccatctatgtatctacctacccacctacctatccatctacctgtcttgtttataaattcatatttatcaactcatatcatttactagactattatagctgataaatatatatctctcatcttttcatattgtctatgtaagtgttgtggctttttagctcccgtagtttggggagtaggagggagtggtgcccagcggcttcttctctcctgttgtccaggtagtaggaaggagtgttacagccctttgactcccaccacccacagctcggcgagcaggagagctacagctctttcgctcctgcattttagcatgttccaggttcttatcctgctatcaagaggtctagggtacgtgaacaccggagaatgagtaaggcagagtagaattttattaagtgacagaaagaaagctctcagcatcaagaaaagactcaaaaataggaagccatctgtaaggctgagtccagggttttttatgggcttagaatggggaagtgcatgctgtttggtctatgggtgggcttgggaaaaagcaccatttgactggttaaaaggcatcattcagaaggaaccagtcgagagagaaagtggataagatggggatggaagttctcactctggtcatggattctatctgaaactggcagcttgattttcaggctttaaactatccttggcttgaaggcggagtttcaccagggatctgtccttgtctacctaggaatttgtctgtctcctgtcactgtgataaagagacgtggcacatatttatgctttaaagactgactggagtcttagaagttaatacgaaaagaaaaagaagaaatgaaaataattaacctgtttctattttatatctactaaaattatcacctctccattttattatctgaagagtcaaactgctttctgagttaactaatgtcattgtcaaaaggaataggcatgaggaaagaaaagaaagacagtaaatttgtttgggacacaattgacatatacaagtggcaaaaaaaaaaaaaaatccaatgataaaactggagttttccagatatttttgataccatggcacctaagaagaaagctcacatctaatgttacaggtgttttgcttggtttactgtagtttggttttcttctttttgttgagtacatagactagaggaccaaaagaaacaaatctaaagaccaaacaaatgcagtcaatacatcaatatataacacaagttcacacaaattttcacaatccagatataaccatattaatattttgttatacctatttacctatatatttcttttttacaactatggacctacaaatatataaaaattgtagttcagtgtcttcatttttcattcttccagcaaaaatggcttgacctgtatttacctaattttgaggtatatatcttttaagatgccatgtcagaaaagcatatcggtttcaaatataaacactaaataaaaaagacttagaatcagatcttaaaaactgcggacttcaacacttcataattaacagcactccatagggaaaatgttattggtaagttctaagatcggtaggagcaacaatttatttaacaatgattatttattctcttacgcaaatacagggaagccaactggtatatgagaaaaagatatacacatatatatgtgtctgtacatatatatgtatatatataaactattatatttaaatatatgctatttatactatctacatatatactttatatatatgcatatgaatgtgtgcacatacgtgtgtatatatatagtaatgtacgctattatacatgtgtatgtgtttatatatatctaggtatatatagatataatgagtgtaagatacactgttctgtattctgcttatttcacttaggactatattgtgaacatccttacatgccagtaaatatagtttaacctcattttttaaaggctgttatctcattgtaatgaggttcattaatttatttaaaaccatgtatatattggtatttgattttggctcttatatttgctattgcagacaatcctttgatgaaagtatcttgtggcacttcccccaacttattcaatcagttgtttttgtatagagtaggcaatatttaattatccattgaccttaactattgcttgaccctttcaaaataagagcacagggtgaagcgttttttttttgttttttgttttttgttttttaagacagagtctcgctcttgttgcccaggctggagtgcagtggcgccatctcggctcactgcaacctccacctcccgggttcaagtgattctcctgcctcagccttccgagtaaactggactacaggcgcccaccaccaggcccggctaattttgtatttttagtagagacgaggtttggtcatgttggccaggctggtctcaaactcctgacctcaggtgatcgcccgccttggcctcccaaagtggtgggattacaggcgtgagccaccgcgcccggcagggtgaagcgttttagatccaagctctgtcagtattatttcctttcacatattgtaatgaactgtgacagaaatgccctttaaagtgtattaccttccaaggcctcatctctaaaagtaaaaacaaccttaaaccctctttcccatttaaatctcctttatgttgttcccttggccaccaatacattccttattgtccctgctctcttccgtggttgttgggtctaaatgctcagtctctccatttaccatactgttttcctccttgcatatcctctttacctccagttgctaagtcattagtgaagagaccaatttacatattgatatttcatttgcctttctgattgttattttcagggcaacttctggagttaaaaaataaaatttaaatgctcataagagatataaatttgttacctcaagcggttgcccaggtaccaggaaaaaaacaaaaacaaacagaagaaaactcatgtaactagttattagagcctgcatagttaattggatttggatttgtaggaaatttcagaaaagtgcctgctactaaattactttgaacattaggggtccgaatcaaagctgctgtccactcttcccagtgaaaacctccctaagctgtactgcattggaggggaaaaactacatgttaaaccattaccgagacggattctctaatgcaattttcactaatttctttgctgctggccatgaaaataactggaactcaattctttcacaatcatgcttaaaatctcaaatcagaacaaatgtaaggagttacagaaatgttataataaatgctattttattttacttatggcaataatgactgtgcttttaacaagtgcagcagtcacactaccctcaaccagaaagaaaaagagatcattttattccatttggcttgccctgttgaaagcatttgatatgcacattcttgttcaaaaggtgttgcttttctaaggcattcacttggtgtgtgaagatcagaattgcaaacaggtcaaatgtgaagcacatctttctcttcctccattctcaaaatttgcttattaggttgtagcctggtttacatttacatttttgttagtaagtgctgagttgtttacaagcaatgttgccgtgcgaaccttgaaaatagctctgatggggaattttgaaagtgccaagctaaagctcagaatgtggaaatcaagtttgtaacatcttggctgttaagcaccgcttgttgaaggcaagtcagtgacttccttagaagtatgtgtatgttgaagtaagtgggatttgtcatttgtcagcggagaaagaaattctcccatgccagattctgtttgctcccctccccaccaaagccacacaagcctggttactcacatgactacagttagtaggtcactggtgactccctggaaaattctaaatacatagctcagattctggacctatactgtggacatctggaagtgccatttctaggagactgtcctcattagccagagttttatgccaattcattcctggacagtagaagtcagcccagagacaggtgagactgtgcatcttggatgatcaggtattgattatattaatgatgcctttggaaggcagatactactgtgtggataccctgctcaggccttggcatcccctggaactgggccagcatcctggcttctcgcttactaggtaggtgaccttggtttaagttatttagcctgttttttttctgaagtttcttcacttgtaaaatgctgataaccacttctaactcatagatttattataagaattaaatcagataataaatgtaaaccagtcagtggcttagtgccaagcattgataagcataatataaatagtagttcttttcatttcattaattgccataccctcatattttctaactttttttattaaaatccacagttgtgggacaacctgttcccttagtcacatttcaatgtgagcaggcacctatatgtttgaattgaaggttgtggtaaaattactttatatttctatgttcaaatattttaaaggtatgttagtaggaagcttatctttgtatttaccatacaagccttcttcagatagtgctttttgtcttttgacttgggacttataagtagaaaatataaaaacaaggtaaatattagatggtatgcaagccacaacaaagaacatctcacttagctgagaactcctttcctcattaaggaaaacatggcatgctgtgttggactgggaaataccgttggtagtggtgcttctctctatgggggaaggactgcaaaactgtccatgtttagacactcaggagtgctttgcaggcaagctaagaccttttccaagagaaagggtggtggtggtcaggggaagtaatatttattgaatgcctactaaatgccaggatcaaggtactattaatagtttttttcatttaactatctcagcgttatacctattatgtttgttatcattatctccattttataaatacggaaaatgaggctaacatttttgttcatggatctactgcaagtgaataagagaatacaaatttgaatccagatgtgctagctttgaaatatattctcctccagagtgttgatcttggctcacagatggaaagaaagctgcagaacaaattgttaaaatctggtaattcaggcacaaagacaaaaaccaattttaaatttctattcaaaataccttagatgaagtaaagaaggcaggaaacataatatttcttaggataatcatgtagctagcaagggtatgtgggctcttctttgatgccaagttgacgtgaattctaaactctttaccaagggaatctattaggatatttagggaagctttttcaaaacacttaagcttggaacctgttcctgaaaatcctgattttcccacccaggagaaataattatgctgttgggcagttaactagacattacagaaaagacaaagctttctttagtacagatcaaggtcctgatggagcttgaaggcataaaggtgcaattccaaatacctcaactgctgtagatgaaggggcagcatttgctctagatcctcatcacagcatttcctggtattctttcaggtaggtgaccaaagctcagcctgcagttcctctgaccaggcttccagctcaggtcctgcccatagaggtggtccacctgatgcagctggccaacttctgtctcctaccacaataagctctagtgaacccctgagcccagtagcctcttcatccaagcaagctctcaccagcttgcttctgtgactcacgaaaaggaggaaggaaagaaatggcccaccaaagagagatggtgatggagtccactgttggggaaaacagtcttatatctttcttttcattttaatcttcagtatcttctcagttaattattctccattgagtcatatcattggagtagactttcatcaatcaagacatagttcattcatcactataataaactttaagcttcttattttatgagtctcgttttagccagattaccttggtgtagattttaatcaatgaagataaagcttattcattctttgggcaaaaatgtttgagaacttaaaatgtgcctgacatggttcttggtgctggccatacgcagctgaacaagacagatgatattctgtacttatggagcttgcccagtggtgagcaaggcagagtgagagtaatttatttcaagtactacaaacaccaaggaaaggaactgcaggatgcttgtgcagcagaaagagctgaggggtcagggaaagctctgtggaaggagtgtttaaacaaatggagaaaccaccttcttctcattttcttaacctgttcactaataagctgcacagctcatagcatgaacctgtaacaaaggcagcatggttcttgtggtgatcctgtatgtactgactataatagacagatatttagagatagaaatagatgagaaactaaacaggcgtataaggttctggcctcattacctcaagccaacaaagtaatactaatgtcagaatattttagcttaagtagagtaaatcattgggatttactttaataattgcaatataacaaagtatgcattgttggctgcctttagataatttagttcttgcgttttccttccctgcctctgtatctcttttccctccctttgcagcagtgtttcttttaggaatggtcttcagacctgcctcagattccagttgggtggatgctaaaaatgttgtttcttagcctctaccacagacttaccaaatatatttagggttggaactatctgtgttttttaacaagatctttcctgcacactaaagtttgagaaacagaacttgatagtcatatctttctactgttgcctcattaacatagtcatcatctcctcaactggctgataaagatgctatctaagaactgcacaccgcctttgtgatcagcttcctgcctccaggctgcacacttggtaaggtgacagattaaaaccgtgctaaactgctcatgctgtactgcctctatttataatgagcatctatatttataatggcacctttactgatcgtatatttacctcctctctctcccacctggggatccatctctcacataaaacatgcacagtctcttgttaggcttttcattttatattctgcttttcccattttgctcttctttttttctctcttggtcttgcctaggactgagcatgtatatgtttgcatgtgaatacagaaatgggtgtcatctctgtatgtatgtatttctaagtgtgtagacatgatggaggtgacccataggtaaccaagccctctgttttctttctgccttgggtaaggcattcacagacatgcactatctcctagaagggatcattaaataggtcagaccttctatggagttggtgaacagtggtgatagtgatgagtcactgatggatgggagaggctatcatggctgaggaggcaggcactaaaagggcatctctgcttccatattttccatgttctaaacttggctgaggagcttgtcagggcgtgcagaggtgagggagccatagttcatggtgttaatatcccaatcaccactcattaattcagccaacatttattgagtccctactatatatcagaatccgtggactcacaaaggtaagtaagacatagtccctgttttccagaagtattgtttgagagtgaactccacacgcaagcaatgaattctcaagaaagaatgttgtgggatctcagaggtagccatgattttttggaaagatcagggacggcttctctgaggaaatgactttcaagtgggctttgatgagtatgttgtaaagttccaggtagacaagagtgtgagagtcgctgcttataggacatgaggtatggacacctacagaggtaatgttcatcaagaatgcatacctgcttatggatatgaaaggatgagacactatgctggaagtgagtctcctcctccatttgacacagtcttgtttgtgttgccctatttcagtctttagctgtgacaaaagcatcaaggtcacagtagtacaggacatgagtttaatttctgattctgtcacgaatctcactggcaaattctacttgcatttaatttcacagtatactctaccacatctcaggccacagtgaaaaagggtcaccataggaaaatctggataaatgttacctcaatagtccaaaccttgggcagcccatattatttggttaaattttcttgagttaacacctatgaacattgccctgatcaacgatcatatatttgtgtgtgtgtgcctcaaaagggcaggctttaaggaaataatagatatatatgcaaagatatatatggaagtagattcagcattatttagaatagtgaaaaatcagaaactaataaattatgaacagcttacttaagtaaatattgtatattcatatgatagaatgggatgcaataaatatatttttagtcttaattatatagggaaatgttaacagtatatcttgggaaaaacatgtatagtgttatgtgcctataaaatatatacagtgttatatcattttttcaaacaaagcatagacatatgcataaacatgtgggtgtggagacagaattatttaaagaaatgcaacaaaacaaaataacagtatctttggatggtgtaattacaagtggtttttattatcctctttatacttttctacattgtcaaaaatttctttaatgcaaatacagtttgcaaataaaaagactgaggggtaaatataaacagaagccaaaaatagatctgtggtaaacatttctgtcccttgccattatgagaagagacagcatagaaaaacatgcaaacagccaataacctatgtttgtagttacttagtgtgtttacagttctcgtattgcatcagcagaaacctaatggagtgatggctgagtcatttacatggtcttggaatgaagagctcagtaaaacagtcctgcctgtttcctaaaaccatgtacaagtttggcacaaaactcacctctctttgtctctttattattattcttccaatgtgttagggtttggaatgagaagtgctgagtctgtttctaattagtttacttatctgaagaatgagcgtaaatggcattaatgcacctaacaagacatctttggtaattctacttttccttaactaatagcactacagcatgcggcagtgccaacaaacactgcccgcttgtttacataataactgagcttgaattggtttgtgcatatttatgtgaccttgagtggagatcagaaaatgcttgcacaattgaagaaatactcaggtttccactctagccttgcacatgtcggccaaggcaggctgctgaaatgttgagtctgaacagtgagtccgtgaaagaaagggttcctgtccctgacagcttatctttaagttcaaggttttcacctaattgtctgttggtgttgttgctctggttatacataaccagaaggaacttgggaacatgtccctaggtggcacaaaacgggggagatgacagtttttcttttaccatgcaagctgtgtttccccactttgggatgtaactcaagatgattttctaagtccacttaagctttaaatcaaaaacaacacttcactctggaatctagctgtggctgtgggatcattttttcttaaggagtgatatgggtgagagaggcatgcctggccgtgatcttaagagccttatctgccagattagcctttagggctgttcacaagataatcatgctttttgaataaaggattgtgatggcagattaagaccctaaatgggagggtcctgaatcacagaacagatctgcatatgtgcacaatatagtgccctaaacataggcaccattcagccacaggcgcaagtagacagtcatttatctagtgttaccacccccaacaactagtgcccatctatggagctggaaagacaaaaaacagagaaagtcacagctcaacagaatcaaacaagaacttattgtaacctaagataattagataatagtaagataagaacttgttacatggaagctgtcactttcatcgttgtgtattgtttttactgggaggaatttgtgagcgaggtgaaagagtgagtttggccacctttgattattctttatgactcttaaatttcacgatttaaaatgacctctgttcaaatctacagtgcttattctggctagataagtcatgattaacagattacaatttaatgagtgaatatttgttgtttgtaatagtgcacattgttgtgaagtgtatatcataatgtaaaatagaataattgatcaaaacctaaagaaaaatgggttaaaaacttgaagaaaaattgtatggaccataaatgatgtaagttgaggcatgctaacatagttcccctttagtgaacatagctgtgtagttcagatcaaaaggccatacaaaacaccccactgtccattttgtaagggcttatttgagtatctagatgacaataatgtcattagtcccagacccagaagtaccacctagaatttgatggcaggtatcaacatgtaatgggatattgggaagtgaatttgatggcatacatcattcactcagtcagtcagcaaagattgatttagtacctcctcttgccaggcactattctagttgctggagaccatcaggaaacaaaacagacaaaacccttaatatcatggacattacattttaactgggggaaggcaaacaataaataagtaaacatatccatgtgtgctgaggtgttatgataggtatattgattttcatccacagttcctggcttacaactcccgtagtccttgttataatgttgtggtatgcgggaaacataatctctctctgaccttttcctgtcctcctttcacctgccgaaggcaatctaatctgattgtgggtcaaaaaaccctcattccagagatatttctgctgcatactctagaggaaggaatgctaaccagagaggccaagaaagatctgaacagttaggtcttgttgggttaaatcatgcactttttattttatcacatttctacgtggttgtcaatttgcctgtgtaataaattctccataaaatgacgagagtactggatttgcagagcttccagatagctgaacatgtggaggttcctggagggtggtgcacccagggagggcatggaaactccacgccccttcccacatagattgccctacacatctcttcatctgtatcctttgtaaaatcctttatattaaaccactaaatgtgtttccctgagttctgtgagccactccagcaaattaatcaaacccaaagtggggtttatgggaacccccatttaaagcctgtcagtcagaatttctggggcccagacttatgactagtgtctgggaggagggagaacagtcttaaggactgagccctcaacccatgggatctgacactgtctccaggtagatagtgtcagattgaattcaaggacacctggctattgtctactgcttagtatttgggaaaatcctccacacatttggtcacagaagtcttctgtgttgattactgttattttgttgtgagaacacaggagaaacatggtttgagtttttcctacacaattggtgtcaaaagtgggatttgctagaagggccctggcccacagaaacatgtggtttggaaagaaaaaggatgaaagaatggaggatgaggaatttaattgctgggtggctacctggtcacccatggtacaaaactgtagttacactccattccattactaaaggtaaaagttaccagtggaattaagggatgatggtagtctcaattcttaaggaattgccttattggatatgcaagagaattcaaaataataagaaccatgctaaatacactatcccttggttattgctatctgtaataggtaaaatgaaagtaaaagagacttccgagtcaggccttgaggctgtactaaggtcagatgtgtgtctctctgagctcaggcctctagcctgaaatctacccacaaaggcgaaaattatgtcaaggcaacagaaagtacctcaaagaccttttttttggtcaccaagaagttagtcagtatgggggaagggcaaaaccaagaaactattgaaactagagggtatagtgtaaaggaattatctcgttttgtggatgggtatcataaactccctgaggaacctgttttaaaatagactgtgagagtaactaatttaagagcaatgtctttggttttaaatgctgcagagaagaacatgtttgggttgatgcagaatccacatctgtgaacaatcacagatggatatatatgatccagatacaaaagagtttgttcccaaggaagcagccagtgtagtgaactgaataaaagccactgtaaagtcagtttacagtgagaggagggactgcccaactctccctataaatgccaagtggagcacctcagatgaagcagctgatatgcttcctatgcaagccatgttggactggccttatgatgactaggatatttgccccctgaatatgtctgttacccagattatggtaaattctgtgattaaggaagtgccttctacatgggtgccccacacgatgttattcctgcagaaatgaacaacagttcaagaagccttacctgatttgtggtctcaacttccacatatgggtctcactgatactaaggacagtaaagggattaaaaataaaataggaagagaaaaaggggagagtcataggactcatccaagcagggtagaaatatttaactggttagtaagaaatggcatgaataaaatggaaattgatggggttaagacggagctcttactacaacactgtggaaggtcaagtggaccggatggagcctgtgatgttcccccagcataaaagggccttgaaccagtttgccatattccctccagtatggagaaacttaaaaagtcagaaggcagagattacaaagagaaatctgatctgacattgcctgaggcatattaatcaaaatacagattggcaaaagggctagtgtccttcggctcaacccctggctgggcacctaaagctttttgcacaagaaagagaagttcctggaactggaacagaaaaatgtaaaggtttatgtgattatgaagttggtatatttcagcatggtttgtgtgaagtggttgtgtctcttttacctgattgtgtcgtgggaatggacatggtaactgattgggggatgtttcccctacctaacactgtaaaacagaaggcctgtaaacctgtccttcaggcaattggatatgctaactgggaatctcgggaagattgcccaagtccacatagtgcagagtagaagctggagtgctggtagggacaaattctccacttgataattatctgtggagctgttactggggctcatggcaaaagcctgtgagcacctcccagcaacaactactgggactttggactggagaattttcactagaggtgcatttactaccttgttattggacattaactgaagctacccctatgatcgaaggacactgaaacttgaaatacccacgatgctttgggtgatagcagagaaatgctctaatagggacggcagtgtccagaagtgttttgtaatacaatggaaatggtttatacaggagtgtgctacctggaggatggaaggaggagatatttacaggcaaggagactctttacccctagaactgactctgaaacagtgtggggtgctgttgaattctatagacatttggacagtgcaccatgaccatctctccactggagctgcttggtttactgacagcagtttcaaagtgaatggacaacatcctgcttggaaggctgctactttgtccaaagtaggtaaaaacagatcagctcagtgggttggactgcatcctgttttcctaacagtaatggaagagtttaacagtggtggaagtccctgtgtttgggtttttactgactcaagggcagtgaccaatggcctggccatacactcaggcaacagggtgatggaaatctggcctatttaaaggaagtttgaggggtgcatcaaggtagagcaagtaaatgcccataagaagaaccctagtccagttttggaaagtgactggaatcagcaagcagatatccccatgtgctctcttaaggcaatcacctgggtccatgaaatcagtggatatgggatatgggagtattgcagcagtgcagagatgggttgaatctagacatgttactcttgcaccctcaggcacaaaatgccaataaaaacggttttgtttatcagcaaaaaagagaacgttgatggccatggggcagattccctggtggaaaggccctgattatagctggcaaggaaaaactgatgctgataaccctgagggctacaaatgggtcttgacaggaataggcactttctctgaagtgggctttgcttacccaatggaagatgaaaatgctcagagggctatttaaaaaaaacagaatatattgcatggatttggatggccgatcatcatttcttcagaccaaagaaaacaccataccacccataatttccaacaatgggcagagagatatgctccttagagtaatagtttgatagagaagtaaacaagcaatggaagcgtcagttgtctgaaacagggagagatgaaagcatgaaggctggcttacatgccttcatgagtgtgctcacactcagcgtggggaggactcaaggagtgtcccactagatttttctctgtctttatggttgatctggggaaagagactggggaggatgctgctaagactatgcagtgcttgccaagggaggagtataatgatataatgactatatatatttttctttattccccaaatcacctcaacaattttttccttcccccagaactcctaaggacctgatggaggtcggttttgcctttaccccatctagaaaaactgagactaagagtgaatgcagctatattgcctgcaggcaaaaatagctcactagttctgcacttttgtaaccttacgctatctgaatggaaatggactgaggagaaggcacttgctagagtagcggtgttgcctacaatctagactgacacagtagcaattaaaatgtcccttccaaaggggaaaaagtttgggtgttaacggagagaaggagaactagtagctgagagtaaagagatgaataaatgggttattaatttaggaaacccaatattaacaccttgaaagaggttcagaccactgtttggtatacttgtctcttaactcaagtattccaaatacctgaaagagtgaagttatatgtttgctgagaccacttctgtttttggatgctgccaagattgaaggggataaatgcttgaggggatggatactccattctccaggatgtgcttatttcacattacatgcctgtatcaaaacatctcatgtacctcataaatgtatacacctactatgtacccacaaaaattttaaaaattaaattagaaaaaaattatgggaaagttaaaaaagaaagattgaaggtaggcctgcaaacctgagtagcctcaccctgggagacattaatacaatataatggactggactagttattaatgactgaatgaggttctagtaatgtggcagcatcttttgagttgtatattcttttgatgtaggggatccatgttcaaaaaccaaggggcagcctgtgatgttatgatagatatattggtttttaatccactgtttctggggcactttaggccttaggaatagaatctctctctgtgaccttctcctgtcgtcctttcatctgtccaaggcaggattctaatctgattgtaggctaaaatacccttatctcagagacattcctgcaccataccatagaggaaggaatgctacatagaaaggacaagaaaaatctgaacagacagactttgctgggtttagatcatgtactttttgtccaatcacattgctacatggttttcaatcatgcctatgtaatgcagccttcataaaaactcaagaggactgggtttggagagctgctggatagctgaacacgtggaggttcctggaaggcggcacacccagagagagcatggtagctccatgctgcttcccccatacctcaccctacacatctcttcatctgtatcctttataataatccactaaatgtaagtgtttccttaagttctttgagctgctccagctaatggggtcatgggaagcccagcttgaagccagttactcagaagttccaggggcccagacttgtgactggtatctggtggggaggggtcttggggacctcttggccttcaacccatgggatgtgacaccatctccaggtagtgttggaattgaattcgaagatacccacttggtgtagaggggaagcctctgcacatctggtcacagcagtattcttctgtgttgatgatcgttgttgtggtgtgagagcagagaagaaacatggtttgaaagagtttttcctgacacatatactatgccagatgttgaaaatgctataaagaaaaattgggccgggtgcaatggctcaagcctgtaatcccagcactttgggaggcaaggcagtccagcccaggaattagagaccagaatgggcaacatgatgaaaccccgtcttcattaaaaatacaaaaattagccgggtgtggtgtcacatgcctgtagtcccagctgctggagaggctgaggtgggagaatcatttgaacctaggaggtggaggttgtagtgagctatcatgccaatgaactccaacttgggcgacagagtgagaccctgtctccaaaaacagaaagaaagaaggaaagagagagagaaagaaaaagagaaagagagaggaagaaaacaacaaaaaaagaaaaattcaatgggataagggagacagagagtgtggggaattggaaggtcactgatttttagagagtactgtttaatcacgtgacctttgagaaaaaacctaaataaatgaagaagctaaccaagtggttatctgcagggaaaacattctaagcagaggggacattaggagcaaaggccatgaggtagaggcatgcttggcagttttgaagaagagcagggctgcgtggatggagcagagtaggcagagaagataatgcagtctcagagctgagtgggagccagctgatgagtgttaggcctttattggagatgttgtctggaaattgaggagaatggagagtgagccatgtaaaccattcttcagaacaagcattgcctgtgaaccaggcaaaataatttactcaagtgctaacttaaaaaaaaaaaaagtgtcaaagagaaatgtgcttggaagaatgtgcagttggaatgctaactgctgcaaccatctctgaggagaacagggaaccctccagcctttccagttaatcatggatcgttatctacagtctgtttcccttttcatcaaagtagtcagctcctgctgtcaggagaaaagaatatatatctatgattttacattcatagttaaaaaaaatcattctttctagaaaatattaactttttccaagggtctgatctagaagccatcagctgaatcccaggagtggatttcagctggctgatgaacacatcatgcctacgtgagattggggagtgaaatgatgatgtggcatcacagccccaggcttaaaataaactgtcctaagcaaaagaaaagtaaggagtaggaaagtactgattcgaatagatagagaaataccaccctcactctgtcctttctgaggtcctggtgtttcctgatgaaattctcaatatctcctggtgccattagaatgggaggaactgttgggagtgttaagtgctgagatatttataactgcagcttaagtgatcattccaaaactatctagaataagtagaatttttaacccactctgaatcttaatgccttgaacccttcacacagaaaagaaggttcatatatatgaaattattttagatttagagacctctcatgtcagtcagtggattcaggttatgttttttaacaataccaaaggatcaaaaatagagttaggggctgggcgtggtggcctgtaatcccagcaccttgggaggccaaggtgggcagatcacttaaggtcaggagtttgagaccagcctggccaacatggtgaaaccccatctctactaaaaatacaaaaattaagcaggtgtggtggtgggcgcctgtaatcccagctactcaggaggctgaggcaggagaattgcttgaacccgggaggtagaggttgcagtgagctgagattgcgccactgcactccagcctgggtgacagagcaagactgtctcaaaaaacaaacagacaaaataaaacaaacatagagttaaaaatgagaccccatctaatttctgtatgttggaagtaacacttgcttagaagacaaaggtctgttttcacttccatcttgccactgagcaattgtatgattgtggacagattgtattctcccagaaccttcccatctataatatagggataattataattctctgtctctaaatttttctgagtattaaagttgagatgtgactgagtactttttttaactataaaattataaataaatatagctctgtaggattgaaagaatctgtctgtcgtgattctcatacacagtttcaatgaggcacttgttattccagaaaaaattactcagagtaaactctatagctatagggcttcagagggcactgctttcagacttgtgatattccttgtgccttctgggaaggtcagtttccccaatagtgagctcatttttagtttgcctcccacccctttccctcctttcacctgcagatctgagagatcaccacagtgccagacacttttgagctactccaactctgggcctttaaattcagtgaaatcattccatgtcttccctagcacatcctttaccctgtgtttttttttttcctttttttcttttttgtttgtttgtttgtttgttttcaataaaatccaaaaggaaggcctttagcctgatacagcccagtgctttaggttcctgtgttagcagactggagactaatataaacagtacaaggaaactagagacccaactagtggaaaccaacaactaatctctaactagtcttttctctctaaaccaatcacatccatctcctttgtcttctttccgcctaaaagttcgttgcctgcactgcagcagggcagtctgaattcctctgattgtgagtgccactagattcatgagttgttctttgctcaaataagctctattaaatttgtctgaagttattctttgtaacaactgctaatcagctaagaagtaatgggcaataacatcttgttctgtagttttcaagaaacactattaagatgttctgagtgaataagttctgcaaatctgtcttacctccttaagcaggaaattttaacaagtgtttattgttaaagtgtttcaaatggttattgttttaaaaatgtactaccattactcactttagcatagtattctgaacatagtttaaccttttttaaaatctaaaattattatgagcaacagttatcttagtgcagtgattactaaaataacttttgctgggtgcttgcgtcattgaccctacactaaatcgctcaaattactatttttttatttttttaagacagtgtctccctctgtcacccaggctggagtgcagtggcacaatctcagctcattgcaacatctgcctcccaggttcaagtgattctcctgcctcagcctcctgggtagctgggattacaggcacatgccaccacacccagctaatttttttgtatttttagtaaaggcagggtttcaccatgttggccaagctgatctccgactcctcacctcatgtgatttgcccgcctcaacttcccaaagtgctgggattacaggcatgagccactgcgcccagccctcaaattacttttaagacatctaatatgtttgcttctttgcttagagttacctgtatcttccctgttgatttccttttaatgtaagccctcatctatctatactttaatccctattatagggctccccaaatttagagatttcactgaaaagtcttcagtttttttgccacatccatttaatctccgttattatacacaattcttttttaaaaaaacgatggattagttggatttttattattattattattattattatactttaagttttagggtacatatgcaccatgtgcaggtttgttacatatgtatatatgtgccatgttggtgtgctgcacccattaactcgtcatttagcgttaggtatatctcctaatgctatccctccccactccccccaccccacaacagtccccagtgtgtgatgttccccttcctgtgtccatgtgttctcattgttcaattcccatctatgagtgagaacatgcagtgtttggttttttgtccttgcgatagtttgctgagaatgatggtttccagcttcatccatgtccctacaaaggacatgaactcatcattttttatggctgcctagtattccatggtgtatatgtgccacattttcttaatccagtctatcattgtgggatatttgggttggttccaagtctttgctattgtgaatagtgccgcaataaacatacgtgtgtgtgtgtctttatagcagcatgatttataatcctttgggtatatacccagtaatgggatggctgggtcaaatggtatttctagttatatgggagaaaatttttgcaacctactcatctgacaaagggctaatatccagaatctacaatgaactcaaacaaatttacaagaaaaaaacaaccccatcaaaaaatgggcaaagggtatgaacagacactcctcaaaagaaatttatgcagctgaaaaacacatgaaaaaatgcacatcatcactggccatcagagaaatgcaaatcaaaaccacaatgagataccatctcacaccagttagaatggcgatcattaaaaagtcaggaaacaataggtgctggagaggatgtggagaaataggaacacttttacactgttggtgggactgtaaactagttcaaccattgtggaagtcggtgtggcgattcctcacttggattttttttacttaaaattattttaaaaggaaatcttatcactactgtgttatcagtatagctgccatttatattttagtgcacatttaaataaatatctgaggacttctgcttctggccaagataaagtaaaaaggaatagatttacactcctgtgtgaaacaatcaaataacaatggataaaatatatgtaataatggttctcaagatactgtatgtcaagtagtgaaggacagtgattcctgaggggtggggaaaaacaaggtagggcctatgggtgctccggcttactctttggagagtttccaggccactatgcagggagggagaccaaggaagatcatggtatgctccctgtgttgaggatatgaaactgagagtctgagaagaccaaggtggctgaagttctcaggacagaagtcttgaaaagagaaagccacatggaagagaacactagagatctgcagaggatctcttttgagaattcagttaagtattggtcagtgcaatgttgtactggatgttccaactagcaaaatatggcaagaagaaaaggtcatcttggaaggaaaagaagtaaaactcttttgtttgcagacaacataaatatctatgtagaaaatctagtggaaaaagctccttgaatgaagaagtgagtttagcaaagttatataataaaatatcaatatacaaaagtccaattacgtttttgtatactagcaatgactatttggaaattgatataaaaagttaaagccatttaaaataacataaaaaatgtgcacttcggaataaagctgaaacaagtatgcataatttaaaccctgaaaactagatttcagttggctgataaaaactacaaaatattgctaaaggaaattaaagaagacctaaataaataggtaaatatactgtatttatgggttggaagactatttattaagatatcaatttatccatattaatctgtacggtcaacacaattccaagtcaaatttcagtagacttttttgtagaaattgacaaactgattctaaaatccatatggaaataaaaaatgatctaaaatgataaaatggttttgaaaaagataaacataagggaccaacactaacagattgtaaggcttattataaagctgcagtaatcaaaactgtggtattggagtaaaaagatcaatggaacagaatagaacgtgcagaagtagatctgctcatgtatggacacttgatttccaacacaagagtaaatacaatttaacaaagaaagtacagtttttttcaacaaatggtgctggaataaatgcctagccacatgcaaaaaaaaattttgatttatacctcatagcatacacaagaaattaactcaatattggatcagagacctaaatataaaacctaaaactataaaacttcaagaagaaaatgtaagagaaaacgtttgtctccttgagttaagcaaagatttctcagatatgataccaaaagcatgacccataaaggaactaattgataaaataataaagctgagttaaagaagccacagcaaaaagaatctgtattgcatgattatatttcacaaacatatctaaggaaatttatctgttgtgatagaaaacaaatcagtggttacctgaggatggacaagtgtgggggtggtacaaggaaacatttgggagtgatcaatatgtatgttctcatctcgattatggtgatggtttcataggtgtatacacatatgcctaaatttattaggctataccttttaaatatggccattttattatgtcaattatacctaaaacagctattaaaatattaaatatataactgttatgaaatgtttgtacccatatcactaaaagtcatcttgtgcattaccatcaggaaccctgttgctacctatgtcagatttagagtttcccaaaggaagagtaacacaaagacttagtttaaaaattctggttttgctaaccttattacataggtgagtttggattgacaaactcatgggttacgttaatgtctcctagtaagtgttaggactccatgagaccagtttttcatgtagctcaaggtttttcctttcaaagggaaaatggaggcttggaaggccatggaatagtgtcaggagaccaagggtttttggcttggcagtaccggagttttgtctccatttgttccatgtgtctaagaaggtcacttaatatcatctctgggccacatgtggaaaacaagaagcttaaatttaatccctaaaactttttccatgactgtccttttgtctccgggctgtagctgtgttgtagagggctgagatgactggaagttcaattaccagatgatagcacaaggtaatgggagaagagttacatgactttaaataaaattcacataaagccaattcaaatttagaaacagaatgattatagtgaaattctatggtgacatagtaagagccgaagaaaagaattgcttatctctttctctatttttataaaaagagttttaaaagcacatcttttcatctaagaatggtcccaggtttctatcttaagtaaatttttatatatttttttcttacagcattaaaaaaagaagttaatactgtcagagctctccctaactctggcagagaactgatgactgtataattgatgacaacttgcaatcctactatgggttttgtgattccactgaagtatatttctttttattttttctttttcttctttttttttgagatggagtctctctgtcacccaggctggagtgcaatgatgccatctcagctcactgcaacttccccctcccgggttcaagcgattcttgcacctcaacctcccaagtagctgcgattacaggcacccgccatcatgtctagataatttttgtatttttgtagaaatggggtttcaccatgttggccaggctggtcttgaattcctgacctcaggagatccgcccgcctcagcctcccaaagtgctgggattacaggcatgagctaccacaccaaaagagtttttcttaacatagtctaaggtaaaccaaattaccttagaatatcagggacagctttagagtgatggtaaaaattaaaatctaaattaaaatccaaacctcacatacttgatacttccaacaaatggacacctatttgcagccagtgttgaaaattagagtaggctcttctgaaagaacatagccatgtccctccaaataacaattgagactattgatcaaaatttctagtcatttcagactgcagcacttgttttaatgacctgctgggcatccataatcacagtgcaggcactagaaagctggaactaactagagatatataaaaacccacgggtaataaaagtgttcaaagtaatagtgctttattctctgttttttgttttttgttttttgtttttcctagtaaaaatctgctcctctcttgaaaggatgaatgcatggtgtatcttagaagctagatatgagatatggaatcttttctatgtcctgtcatttccttcataatgccttttccctttcaccaaatctgtcattggaaaacaagtggtcccagattcactggatctctctgaaagaaatgggagctactacacccagaaaattatgattaataataatttagtgtgaattaacttggtgtggtattaagaaattcagtggcatttctataatacacagtaaaatctgtggttctatggggtcattatttgggacaggagagtttctgagtcccttccatcttgttgcataaatgcttccatactgtttcctggaagtctccactctttgccctgtttttcttccattaaaatcttgttcatttgatgtagctcaataataatttttccagtcagaataatttcaaactgcatcctaagtgatacacctaacacatatatttaggtataaggctgaaatatttgcctcattccttacagagaatttgttaatttgctcttcctttacttcatttaacaaatactgattgtgcttcatgagctctagagccaaccagaatgcttgggtttaaatagagctaatgtcagttactagcagtatgaccctggaaaagttacctaacatctctcttcctctccttcctcatctgtaaaatggagacattagtacttcatcatagggatggtataaggatttaatgacttaatatataaaactctcagaacagaaccatacacacataagtactgcatatgtcggctatttttattactgttgctactataggttgagcatgcctaatccaaaaattttaaatccagaatactccaaagtccaaaatttcttgagcacccacatgataccacaagtggaaaattctacttaatctgtattactgtgagccaggcaacaggaatttgaaggtgtacaagagaacttcaactgtgaagccagtacatatgtgatttcatgaaaccaggccaccttgactcaagagtacatcacacacacacacacacacacacacacacacacacacacacacaccacacacacagagagagagagagagagagagagagagagagagagagattttttcctgctatgccagaccagatcaacagtgatgaattctatgggaggactcacggagagcttttaagaggagtgaatatttaggtagcatcctgatgagagttgtcctgtagaggatggaagaggcatttgtggtagaggaaacaacatgattacagaaattagatcccttctgtggctgcccttgttcttagccaagcagttgctgcagctaccctgttgatctgctcttcaaggatacgggataggagggctggagcaagggaccagggcatccatgggcatcatctaccatgcttcattctccccacctcttccagagcagacctagatgaggcttaccttttttttttttctacacagtataaacacagagtggttcagccatagtcatttatctaagcctgcttctcccatgcagaagggaatcatgttcattaggagcaatacagccaggaatattgataacagctttgttctgtaaagctgaaggcactttttgtggatttgattttatttcatcatcagagaatgctccttgagattttgcaggtgcaggataacatctctgtgaggcagaggcacttttgtttatttgttcgtccttcatgactctacagggcatgttggtgcatctggttaagcccagagaagagacattcgcagatgtgggccccaccaccaattcagtatgccaagatgtattagatataaagacagataaatattacccagtggttcccagtagttctgctgcttgaagggcctttgtctgattgttttaaaatgtgaatgctattttcatagccagtattgtgtggggctgtagtataaataaggtgctacaatgaattttaactgcatttaagcagagattgctattaccaaaagatgcggaaaagaaagtggaattgagatcattataaaaaaatatggatctagagataaagcctaatagaaaaacagattttggtaactgcctggagtaaattgaaatttggtctcaatgctaatgtggtagaatatattcaagaataaaatactgacttaatcttggttattactacatggagataaactcctcatccatggaagatgaaataaccttggaagttctcatgccattactgtgtagtgtacaacaacaacagcaacaacacaacaacaggaaattaactaaatggggtctcttgttggagaatgaccttttgtcagcttcagaacagttgactcatttcagaaatcagcataatacaagagtatttcatttgttaaacatcactggaaaaatttttgtgtgtgcacatatatgtatgtggtcccataagtgttttcattataaccgggtcatgtcccttaatcacaaatcaaatttctactaatttcaaatcaagtttctaataatttaactgctcttagattagtacactatcaaaatagtcctttattgttgtcaaacctgctctgaactccttaaccagggcagtcactaggccagaaactaagcaaataataggggcttgcatacatcagcctcataccctgcatacagcatataaaaataaatgttagaaagtttaatttcaaacagtaacttgaacatggggtcaaatacttgaatatctttgaaattggatactcaaggtattctgttagcaggggcttattttcacatgcattgtttcacatgcattgaaacatgcattgtttcaaatgacagcagcaaaccacagacgcttcagtcatttctctgtccctttctaccagctgtctccatatacctgggctttccacttaaacacgattttgatgtttgttttcgtgcggaggagacaaaaatccagatgtttccaatgcaaaagcttgttctcatctttattattaaaaatggtaaagcttcatttgtattttattaaaatgattggataactagtatttttaaaagaactgtagctgttttggctttagctattgagcttaagacagatgttgtgggttcaaattgtttgaacgttagtgaaagtacgactgttaaggaaaacagtattatgagtggcttctttatcttaactcatgaggccagtctgtttgtaaggttttctgtgcctgttcagaggtggaactatatcatatgtatgacatgctggtttgcttgtatgataactttcattgccaaactcctgaagtgttctatattggctacagtcagggtcagaatcaaggtcagacatttttgttggattgatattagcagttcagcctgactcttcattaaataccctgcccagctgtcaagctaagcagcctcttatctctcatgaatacccaatgttttcttgtctctgtttctctgcatatcgccttcttcctaaagaaaatgttctttctcctcatttctatgtgtttatatcatatctatccttaaagggtcaattcaaatgtcaaaattctttgaagaattctgtaagtatgccatgatcatcttccctatctctggatagataaaggtgtgaattactgtttttaccactacttattgtaaactattaattgagttctaaaggttaatctagcactataataagcagtttagtgcatcgtctcattttgtgatgcttttgtttctattttaacaatagtgatgataaatattaaatctgtgttctttaatatgaaaattccctcatgtatattatctcatttaatctgcagaacaaccccataaggtaggtgctattgttattcctgattcagctaagaggtaatccttagagagggcataacaattatccaaggtcaggtggctagttttagaccttcttcctaacaaataggctagactgtccctcaaacctgcacctcctttaccatatcacttgccacttgccacttggttgtgtaattacctatgacctgaattactgtacttgttccttgagggctaaatttatgtttgagtcttcctggtgttctaaccatgactcaaatcagtgcctcacacaaaagtaagggtgtttcagaactatctggtgaacaactgaaaatttagaacctttcatatattcttttatagctctgatatggaagatttcttgagaggaaagtactatgtttaactgtcatccaaataaaatggaaaatatagctttgaccaaaagaaatgatgtgttctaagagaataaaattaaaagaggattttaaaatctgttatccagtagatctgaaaataaataagaactgtcctcttgctgaaggagtaaatgcctttaaactttcacagtcatcgtatattgcacataaatgtggaaactggaaatctgtttcccactgaaagtaaagaaattgtgtttgaataaaagaaaaattaatattagtgaaacaatgactactaaaaatgatattttagtaatgaacacaaagtgaataacattatctttttatctttttatttttattatatttctttacatttatagtgtaccaaacagttgaataatggactgatttccatcaagatgtttgtcattgaattgacaaagactcaatattaaagtaggagaaggtgttgaagataagatgtcttatctagagacgaataaccttttttatctttaacaagctgtcttatctttactaccctgccttggaaactcaagagagtagcagccttgaatacacactgttatttcctccttcatggcctgagactgattcagagaggaaatgccccatcagaaggatggatgtagttcgggctaatgaggcagcaggtagacccatgaggagctgaccttgaatggatgaagaactttctattctggatcaattatcgtaattattctaactccatcctcaattgtacattggatgctaaagagagctagttagaattcttttagccacctccagttcatgagataaaaagagataggggtgaaggctttagttgattgacagtttttaatggtagttttgagggtcgaattgaatagtatatactgcaagactttttgaacattaagtatactcccagtattggatatattatgctaatagactcagtcacccaagagggtttatctccttgcttcctgcctatgcagttaacatcatgtagatacaacaaggctgatagaatttcatgaaacggttgttgaatgtgcacagtttggatactgggaccttaatatctaacatgtgatcctctatacaaatgtttatttaactgtacacagatgtcgtaagaggtactattagggttttgatttgttttcattttcaaatggtagtttattttgtgtgtgtgtgtgtgtatgtatgtatgtaaatttgaatctcattcaaattctattcataaagaaatcttaaggattaacctttataggctaccccaagggcctcacaaaagatcctgagttttatgatggtgaattacactgacatttcctaaagagttacgtgttttgtctttgtaatggaggccttagatttctttagaactgcattctatttagaagaccacccactcgtgccctccccaattcataatgagagcaaattcaagggctgcctagagccaatgaaataaaaatcaaattatttttcctggcattcatggtagaacatgatttttcttacacttttccctataccgtatgcttctaacaaagagttgcacattccttgctttctacctggatacctttccacatgccgttccattgggaatgtgtcaactaaggtcatacgttaccttcttcctgaagaattctatgatttcatccagacgaattgacctcctcatcctctaaactttaataccatgttacatctccttgtaacccttatcataatattttaaattttaatatctgatcttcccagcttgaagataaactgctggagcctggggaatatattaatcttatctttgagtccaccacagctcctggggcaatgcctaaaaatggtagtgagtaaacatttatctagaaagaatgaatgcactgtccttttcctaaaggcaacagtgaagctgaatttgtatcatttgtataaaacactgggtaaggttttaaagactgttacatgcagaatcttttccttttttattgaaagcattgacttagagacgagatgtgcaggcaattatgaagaatatatcttaagatgagtttcaagattttgaaagatatgtttcctaaaaaaacagaactcaaaatattatttagttcttttctgtggaattcttaagtcatccccacttataagctctctcattctctctctctctctacatatatatatgtatagaatgagagtgtatatgtatacatatatatatggaatgagagagtgtgtatatatatatggaatgaaagagcttatatatatggaatgagaaagcctctctctctctctctctctctctatatatatatatatatatatatacacacatacatatatatggaattagagcttataagtggagatgacaagaattatatatatatatggaatgagagagagcttatatatatatatatacacacatgcatatatatggaatgaaagagcttatatatggaatgtgaaagcttatatatatatatatggaatatatatatatggaatgagagagcatatacatatacctatatatatggaacaagagacagtttttaagtagaggtgacttaagaattccacagaaaaagaactaagttatatatatatatggatattatttatatatatatacacacatatatgaaaggagtgtgtgtatgtgtacatatatatatacacacacatatatatgtatatatacacatatgtacatatatacacacatatttctgaaagttttccaaaagtatctcccttcaatgaggaggggttagtgtgcatcagctgaatggtgcccacagtgatacaggctcatggtagttctggcaaatgtagcttcctgccagtctgcaccaagccgacttgcatggtctacaacaggccttgcaatccacactgtctctccattgctggcagctcaccggcaggaaaaaaaggtgacaaaacgagtttacttaacagccttaagctgccttaaatgtgtgtcttcagccctacgggacaaaatcactcaaaaatttgtgaaattgttccatgaattcatcagatgtgttatgtagtatttgaaatcaacttaggacaagatctaagaggccagaaaggagtacttaaacacggaattaaagatggcagtgctttagtttttccatctggggcaccaaactctaaattgtgtaccctagttctgtgttctgaaattatttgcgtcagaggtctaacttgatgttcaagtggtagagaaaagagggagaggctaagggagctggagacagaagttggggcagaaggaaaggggtaatgaatgaatgattccaaaaacagaattctctatcagttaaatacagataagaggactaagaaactaaaatgttgaaacaaaaattaaattataaagaaaatagtacatgcagatgataactttacctcctctaaaatttcttattgtagctattatttttcttctgtttctagatacaaatgaaaagcttcatgttttatttataatgatggtgcctaagaaagacattcagaaatcaaagatcagaagtgggaaaaataatttagatttgaggattggcagagtaaagactgcgtgtgtgtatgtgtgagaaagagaaagagagagactttcacacatgtcagatgtgttttaccatcgtagtctttctagagacaaacatctggtttgctctaactcctttttctgtgtcctgtaaccttcctatccatgtgctttttctcttaggaccacacttaacctgcttaaatagcttttaagccactttgggaaggaaaaaataaagaacccaatacacttgactgcagagttagagaactgctctcttaaatctagcagccttttctaatgatttatattataactcagagtgtgtcagacctttgtactagaagggcatgtaaattagaagaccatgttttcccagtgcaaagattataattacaaaaacaatttcagggcaacattttgttgttttaaattgctcttccaagtctctgtttacagtatttctaaacatgacattctatactgcataccatggtaggcatagtgagctctgagaatttcagagctccaaagagggacagtctaacccagagggaaattcagaggaatcatgggaattggcagcccccttgggtatttggttattcccattttactcagtcttccctcttttgttttttctgtcttaatattattttccttttctcctcttcttacccttttttaaatattcatttgagagagtcggagaaaagaaaagagatggccagagacaaaataagcctaaatccctcagggaggataatccttaaaacagaaggaacaacaaatggtaataactactaggtttctaccccagttctgaatgagtaagacaagagctctcctgtctccagaaaagaacagaattcaacaatctagagactatgtgaaatattccacgaacactttaaaacatgagaagtgccccacagtacacctggaggcacaaatgagagcacagttaaagctgggaaaaatcagaagattttgagtctagtgttgaaggatctgttcaccagggattgtgctgtgggaagatgaggaggaagaggaggaggaggaatttaaaacagacctatataaatagagaagagagagcgaaaaaaaaaaaaaatccttacaaaggtgtgtgtcataggatatgagggctggaccatgccttcatccctctcatttcacagaaggataaagaacaactgaacaaagtttcctattgcaattcaaatgcagctgtataagtaagacatcagtttttcaggaaattcttctgtcaaggctgtccacacctgcatttatccttccatctgcctgtccatccaccatttcatccatctctcctaaaggcctcaggatgtgttagaggagccaactccttgaactctctgcccaatacacatgtataaaacagacccaaaccatttaattttattttatgcataagtgagaatagaaccaaatctcaattgtttgtgatcatataggggaatagagatattgactaccccaaatgagcagataatcttcaattcctctctatttggattgtgaacatgcattaatgcttacataaaatggggctgtgcggctggatgcggtggctctcgtctgtaatcccagcactttgggaggcggaggcgggcggatcacgaggtcaggagatcgagaccatcctggctaacatggtgaaaccctgtctctactaaaaatacaaaaaattagccgggcgaggtggcgggcacctgtagtcccagctactcgggaggctgaggcaggagaatggcatgaacctggggggcggagcctgcagtgagccaagatcgggccactgcattccatcctgggcgacagcaagactccatctcaaaaaataaataaataaaataaataaataaaatgggactgtgcattatatattggcaaaatactccaaaacaaaacaaaacaaaagagagccacccagtaaaagcagtgtctggaggagcctaaaatatgcttaaatgtatatggtcccacaataggttgtctgcaggctgaggatcaaggagagccagtctgagttccaaaactgaagaatttggagtctgatgttcgagggcaggaaacatccagcacgggagaaaggtgtaggatggggagctaggccagtctctcttttcacattcttctgcctgcttacattctagccgtgctggcagctgattagattgtgcccacccacattaagggtgggtctgcctttcccagcccactgactcaaatgttaatctcctttggcaacaccctcacagacacacaaaggatcaatacttgcatccttcaatccaaccaagttgacactgagtgttaaccatcacagccatttattatgtttacttggtaatatcagagactgaaacattttcactcttttagcaatgacatcgggttgtccagccaacatggaggtgattttggtggggaattcttatcaaaattattcttaatagaaagacataacaatgtttattaatatatttcagatttaccgaatgtatttaaacatagctttgaaaaaaatctccatatttccgtagacttctgatagttttagagaatcattttctcagagccctagagtttattctagaccagggctctgagtttttcctaaggcagatgatgctgttccccaaactcttcattttcttgtccaaagattgtgtggctaccatatgtgaatggtggccccctcaagtctttgaataaaatgatgttagtgtccctggatggatagtggctgctttcctgcagggaatgattactatgacttatggaagacccgctatggatgtcatgataactaccatttatttattggccttttttgttcataatttgttcttcttttcacagcaactttggtgcctccttcccaagtttatttacaaaacatttttctaaagtaataaaatgactgcctacagttttagccttagactgtaattgcttcctaatgaagatcctcttaagcatgggagcttatcatggtcttttggggaagaggtaaaggaatgaactgtgatggtagaaaatatgattcctactcctttaccctccaaaatcatccttagtcgtggtgaaaggatcatcttgatgcgttccactttcctggtttctgaaatgcataggcgaccaccttgctgtgatttatttcatgggacagaagtagtaatgtgctaatggggctgtgtcagcaccagtgtgcatggagatctggacatcatcagtgccagcggaaagctctggggggactcaatgaggcagggccctgagttgggcatcatggctacagctgtttcatgcacaggaagattcaactattttatgagattattttcaatttttaaacatgaattctgggtgtccatctctagggaatggagcctcaatcctttggtccccactttgctgtgaactgtgggccttccagggagtcacagaacagaagagaaggcttttcacgctcatactgagaatagctttagttcttcctgaccatacttgatctgctgtactatcttttatgaagttgatcatgtcatgcccttaggtatctagatgcaggtattcccgcacaggactagacatgttttaagggtgagaactatgccttatagtacccagcacagtgatttatatatgtcactgtgtgtgtatatatttctgtgtatagtgatacatatcacatatttgactgtatatgtacatgtgtacatatttatacatatgtgtatgtgtacatatgacacccagttagtacttattgaattggctagtcttaattaaataattggtcttaaataattaatttttactctttctgtgcttgtttccttaaccataataataatttcatagaggttgttgtgaggattaatgacttaataagtgtaaaactcttagaaaagtgcttaggatatactgagctgttgctatttgcctgggacatagaaagtgtggggcgacagagtagggattcctctttcttcagctctctagcaatgaagcagaatgcgtgtaaaaacttaaggttctgagaccaagattctacgaaattagaagacatagttatgatagatttcaagcactgaaagttaccttaaaattcagataccaactaaaataatctctccagggattaatatctactaagttcactgaaagaacgaaagtagaaaaaagagaaagcaaaagaaaaaaaatgctcccaacatttctaccagaaatgtggtatttctggtagaatggcttttcattcagagattatttgtcagaattagctccaatcttacggaaggtgactaggaatactaaaaatttagcatagttttgaggggatcaattagagctggggaaggtgggaaaaactttaaaggagattctaatgtggttgtgctgaaagatggtagggcaatacttgattacattcacttccacaggcattgcttggtgtgattttggccccccaaaaagatttcagaagtgctttgtgttttacgtaggccttcaggctgagagtttcttttttcttcttttttttttctagccttctacacaaggacataaattttccagaatgttcattctgcctgtaaaataatgtgacacagttagccatatcagacaagtgcatcctgcccatcagtgaagggattctaaaacttaatgaatccttaagtccactaatgatgttggatgttcctgaggctattattccagattgcttctgacatttgtgtgttcatatcagagtaagtttgtatcattcttcagttcccccccagtgaatgttgagcctgcatagcagataagcataagtctatgggagcaacatgctgacagaaccccttagacccatgctctccaatgcattaactgttagccacagtgtgactttttacacttaaattaatacaaggtaggtaaaatttaaaattcagcttctgagtcacactggccacatttcaaatgctcagtcaccacatgtgattaatggctatcatactgaatagcacagatgtggaacataccactattgtagaaggacagtgcttcatgagactacaggcataaggtgagaaaattgatcaggggctaatagagagcaagggtgtcctgtttcaggaaaactcaacctgtgaacatgcagatttacacaaaggaaaatttaggaggtgtccattctcctcatatggcaattcaaaaaacatttttatccaactacctccactgattaattaaatatccctaatcatatttagaaagcagtcagaaaaataaaatgaatatgaaagaaagtaaactaaaatgtaaggctattatcaaacactaaatcacaggaaaccatatactgggaaattttgtcagagggatatagtggatatttgaaacatatgtttacatctgtctttgaaaccagccaacctggatttgggtccatctttgcctcttggctaatggccccatgaacagaagcaggcagaactctgcaggtttgtcatgaggatttgttgtggaagcatatgtgcatagcagcacatagtaggtagtttgtaactactaggacttcccttcttcctgttttcttcctcaccttctcctttgggtgttctcttccttcttcctttcttgcatcctaggagcccagagcctgtcagttccacactcaccactctgcattttaggggtccagctatgtggagagagaaatccctctctttttctgtgacagccccctgaacagtcatctctgataacgccatggtttcattcagtcaaaatggacatatccccttgataagggatactacccataaggccactgatggagatattttggacgagttttattattccctgagtcacatcaaaagggggaaaatagcatcaaactagaaattaggagttctggatatgtttcagcgctgacaatgatttctacaagtcctatacttcatgggcttctattcttcatctataaaatggaaaggttggagtagaaagtctcttactgcctctttcagctcaaatctaagtaagaactactcactgcctcccagctagactagcagctctgtgagggcagggacttgggctgtctgtccctgttgcagtcccaatgtgctagcccagtgtccgtcatttattcaatgctcagtgcgcatttgaggaacagatgatgagaggagcccaatctgcctccctcgcacatgctctggtgggggccctgtgcctctattgcagactaccttcactccactcagcctctccccgcccctccactctctccagcattatggctgctgttctctttatttgtaaaaagttgcagcagctccactgtgttactctaccatttctgatttctctgtaaagctggggctgagaaacaaactgtactgtgtaattatccttgcaacactctcttcgaagaattccaatttaatagaattaccaagatttaaaaacattaaaacaaaaatgagcttgttagagtaaattagacttcataaatgtgttctccgtttattacaaaacattgatttctgtggtcaccttctctaaattattgaaagttgagtagactgccttaattggcaaggagaaatgtcaccagccaactctcatagaagttgggggttgggggcatgcatgggatggagacacaaagaaaggggaaggaaggacagggcccagctggctacatagtcctgtggaaatcattatggggaaacaactcacgcctgccttggtgaagctctgtgagaatagcaatactagtctgggaaaggagtggataaatagtatgctaatggcgtgcagtataaatatagagcctcctgattccatagcaagaatggagatgcttgtttcctaggcaggaaaatcttttttcatgatactggaacctggcctaacacagattaaccagcagaggtgccccgggttctccgttctgctcctgaccaggatgactttaaactctggcctctccgtgtccccatctcacacgggcactgatgcctgctgactacacctccccccaggcctcttatgtgagcttgccagccccaaagaaatctactctagtctctgagcttcttggagatcatagtaatcagtgggaagagagcagagtgccctctctggagcctcctaaccaccggtttggagaggagagcagtggctgtggccagccataatgaagcccccacagtggctggcctgaggaagagggggaggaggcagctgcaagcctctgagcttcactgccagtactccatcattttcttgttactgaaggactggcagattgagaggctgagtttgtcgaattatagagagtgtgagcttccaaaggcaacagtgtcatgctgctcatttgctgttggggaaaagtataaactcttccatgctaatgactatattgtgaagcctccaaactagtctgacttttttagcaaaccttcccaacactgctgccctttatagctggtcaagtttaattagaaagaaaaagtctccaaataataataataatataataataattttaatagtattcacttactatattctagaaactgttctatgaagttgtactgtaactcagcttatccttatgaacactttaggagatagataatattattctcttttacaaatgaagatctgaggcataaagaggtaacctatccagggtcacagagttagtcagtggtggattctgaaattcaaaaccaagttatttggcttcagagactggactccaagcccctatgttaagaacacaatcctaaaattgaataaccatgaaacacttattatgagcctaacacaaagcagaccttaggtgtggcggggtctatgaatttgagttcagcttctaaggtaaattacatgtggggtggctttttccgaacttttgaagaatttcaagatggtaatattaatctttagagagttaaaccgggcatgggacccttctccgcacaggtgacaggccagtgaagctgtccctgttctcaactcccagaaaaacaaaacaaaacatgacctagaatacaaagcaagtagaatatttgtaaaaagaaagtggaatgaaagtgctgaccagggggcgatttcatcattgtgccagtgacaagggcaaggtaaaatctgtgatacagacagcatacagtcaggaaagtgaaggtcatggccaccacaggaaggaagttgtattcgtttagtttcatactgctataaagaaatacccaagactgggtaatttatacaggaaagaggtttaattaacttccagttctgcatggcttgggaggcctcaggaaacttacttataatcatggcggaaggcgaaggggaagcaggcaccttctttacaaggtggcaagagagagagaaatgcaagcaggggaaatgccagacgcttataaaaccatcagctctcctgagaactccctcactatcaggagaacagtgtgggggaaaccactcccataatccagtctcctccctccctcgacacatgaagattacaatttgagatgagatttgggtggggacacacagccaaaccgtatcagaagctgactaaattaagacattgacttttgggttaagagtcaggttcagctgagccaggcaagacagtgcatgttcatcgtattaatcctagcatcactcagttagacttgctccgaaacaaaacttctttaagaagtcctggtaggaggttgtggaactattttcatgcctttgaagctgcaggtcagaaccacctgtgactgaatgcatgagcagcaggagctcagctggattatattatcgcagcttcaaaatgaccaaggcctacatgactgtctcataatcagtcactcgaaagatgccagagaccatagaagaaaaggtctaaagggaatttttagttcaaataggctagctccagggacctgctcagggtcaacatgcaagatgctggagaagcagcagcataattaccattatttatagctgtgcgctgcacatgtggaatttcgtacagtagctgtgatttgttttctatgtaaccaacatagaatgcaacatagaatccagttccctaaaatacatcgcttaacactgtgagtagaggaggcagccaaccatcccatcactccacggcctctttccagtgcccctcccccaatgctttctcatcttaagcctcacacgtacttcctatcccctcccctcgtccccctactgccaccctcctccccatcccccaacccagattcaggacacaaatgattccagccatctcagaacactcttgctgtggtctgtgtgctctgagctgtatctcaataggatctgggcacatctggctgcacagtaggagtattgcactccaaagtgcaaaaataaaaccacaaaagatcaaaagaaaagcatggtaggcaagaaattacccttatctttatctccacagcatccatcaagtacaagcatctgagagatggcaggcagcaagataacaaaagggaagttgggaggaaattaaaagcagcttccaatcattagcccttcagctggcctggaagggcctaaaaggctccgagaggatatcccacagacagaaccttcattaggaatggacctgagcaaaagagacgacctgctgatcatcaggccttaagatgacagcctggcgaggcaaggttaaaactggaaagccaattttatttatgctttgcacacagtttggattgttttctcccttgcttagcatatgcacttttgcctcttcctggggtttgaagttttgcttgatgaagtgtgaataatcttcatgtccctgccctacaacagtgcccagggactcccgcaggtggatcacccccactgcagcccaaagaactcctctgtggtgattagaagggctgtgaatatctctttcccagatagaaatttgtttctaaatcagcgtctaatctcttgactgggtcaattttccatatatttatgatgaaactagtctgctgatgcctgagccatgttagacacagtattaaaaacagaatccgggccgggcatggtggcttacgtctgtaatcccagcactttgagaggccgaggtgggtggatcacctgaagtcaggagttcaagaccagcctggccaacatggtgaaaccctgtctctactaaaaatagaaaaattagccgggcatggtggcaggtgcctgtaatcccagctattcgggaggctgaggtaggagaattgtgtgaacccgggaggcagaggttgcagtgagccgagatcacgccactgcactccagcctaggcaacagagcaagactccatctcaaagaaagaaagaaagagagagagagagaggagagagagagagagagagagagagagagagagaaaagaaagaaagagaaagaaagaaagatagaaaagaaagaaagaaagaaacagaacctaccacgtttttttccagagcatattacatttaggagatgtttgacgatgacctgggtcagttatgaactgacctccttttttacagggtcaatgttttattcaaactgggacaaaactgatcacaaatgataaagattcggactcaaattcaaaattgtgtcactctgatctgttatttatacatagtacatgccctgtgccacagctcttagtctatttgtatcatatgcgtccctattggtaaatatcttattgttgataccaggctgttgtgtttggatacagagagtgcactgtgacttcaggggagccattcatattgtattattaagggtggcaccttctggagttgtacagtgtgaacctgcaaagccacgtgtggcagctctgggtatgtctgttcttcagggacaaaggtggtaatctgttcagtaacacatagtaagagttcggagatgaggatatagtccctgcctgttaaaaagtactctgtgtcaaagggaaataaataaagacaggaaaattacactgcaggccctaagactatatttgaggtatgcatagagtacagttgggaaacagagaagagaactattaacttgcttgaaagaatcaagggagacttcatagaggagatgacattagaccttggtcttgagggatgagttgatattacatggagtgaatgaagaatttcaggaagaggaatgtttgtgtaaaaagacgtaagtttataaagagcacagcttatggagggcagagattcctcagcgctaaaagcaatggggacagtgagtataggcaagaaagcgtgtaaggaaagatagagttagaaaggtagggtagggccagatcacatagaatccttgttaaactctttggaggctaagggaaaatttatcaagaaatggattcagtactgactgcttagccaggtgggctctagtcagaaaaatgacagccaataaggctctgtcttgcttgtggtggcagcaaaatagtgtttcagagcatggactctagaatgggcatgcatgactcatctcttaaggttatttagcctctgtttacatctgtttcatcagctctttaacggaattaataatagcatctgcctcatagagttggggtgagtttgacatgagacagtgtttgctataattcacctgccagagtgtctgctacttagtaattgcacaataactgttggtggatcttcctacgcttctgcttcttccctttccctgactgtcctccttcccccccttcttcaaattactattattattgcaaatttcacaaagcctacagtccagatttctccataatcctactctgaatagattattaataactagtctgcatttgctagacagcaaccctcaggtcatttagagacctacttggtactggcaacactgaaatcagaagataatcagcaaatcctaagtattttgtcttctcacatcaattaaccacattttttaaagttctactgccttcttgtatactcagctatggggcatttaatttctggtttctgttcattgctttattataattttattttttcctaaactatagcttaaagttgccttaagctattttgaagggaaatggtggaaaggaaaactgttattctgtgattttgccattatgagtattctccccttcccctaaacacgcacgctcacacgcgcgcgcgcgcgcacacacacacacacacacacacacacacacacacagagagagagaaagagagagagagtttaatacaattggcttcattattaaataatactgcaatctgtatttaagttgacaacataggcatctctttaacatcttaattaaagaatgttggagcgatgctttctgcttttttgatgacaagtcttggctcatagtcaaaaattccagtttagctttgacaagatgaggacacttctgggagaccaagggccccctgtggcttaatgctccttttttttttttcagaagaacatttggtgtgtgacttgaacataatgtttgagtccaacataaaatagtagaagaacaagccttttattagcctttctgatctctttccaaaggtgcactcagcatttcatctttgtatttagctaccagtatgcaacactgaagccattgcaatagtcatctctaagacatgaaataccagcagcgctgtgccaggctccccagctttggcaagccccaagcctctgcccatgcagtgattcagggaggcagctggatgagatgaaggcagctccatcagccggtggtcagaaagccttgagtctcatagccataaaagcatgccataaatctcattctccaacaccatcattaggcaacaaagtaggttttcctggctccttttttcacttccctcacatacccactccacacaatccaggccactcttttggatatcttttgccttttcacagagggcaagaaaattagcctttatttatttatttatttattttttttgagacggagtctcgctctgtcgcccaggctggagtgcagtggcgggatctcggctcactgcaagctccgcctcccgggttcacgccattctcctgcctcagcctcccaagtagctgggactacaggcgcccgccactacgcccgaaattagcctttattgaactacattttgggcacatagtaggagttcaataatactaatccttgtattatatttccagaccctacaatttccatttttacaaatacataactgaaagctcaaagtctgtaccagagtaacagcaagaattggagagtcatctgatcaaaagtgtctgactttcttctacttcctagcgttgaacatttcctcagatttcccctggagagagatgcagtcgtccttagagatgcttcttgatccctttagaacctcaaggatcacaccaaacatccctaataatctgtgggttcttggatggagagctacactgttactttaatctacaagtaacttgaaggaaacacattgtgggccagtgtcataatgtggagcaaaataagccagataactacctatggttccatgtataaaagttaaaacaggcaaaacagttgctggtgttagatatcaagatagtggttactgtcagagggtagggaaatgaaagggcatttaagtggcttctggagtgctggtcgtaatctagaactggtgacatgggactgttctgtttgtgaatataaattgaaagatgtgcctgtgatttctgcacttttctgtatgtgtgttataattcagtaaaaacattgtcgaaagttgcatctggcttagagctcagagggttttgaagcaacttctttgaattgtttgacactttcacaatctactgaaattttcaaggggaaaaagacaatagtttatatatttttaaaaatcttagaaaattgtcgtcccacatctttccattattgctgatgtttcagctactatgttgggcttagagtgaaaatttgaatcccaatctgttatcaagactttaaattctcccattaaaattcaaaagtaatgattcttcttttttccttttactataagataccgattaggatgaaatgtgattcatttttgaactttactgatcattgtagtaatcactgatgtatgttacaatatacataaaaggttagtacattagaattgtgttggattaccagcacctgctaaagtatacgttattgacataagaataaaggaagttcctagccatagagaaaatcttcagatagtgagataccatgatcctgactagataatctacatacaatgagcagtaagcagtcacattttttcatgaggcatctactgcaaaataaatatgaaaatagcttgtactaattgaatgcttgaaaaccagaaatgcttgaataccagcaactgttttaagcacattgcattggattgactcagctctgtgaaagagatgctcttattatccccattttgcagatgaaaaaacagaggtccacatatgttatgtaatcagcctgattatacagccagtaagaggtagaactcacacataaaccaactgagtttggcttgtttcttctggcaaagggcaacctggtcattctcaaggtttcagtccttcactcttcaatacttaaagtcttttgggatttcaagaataacttgaaaaactgagggcttgtcaggtttatgatgagaaaagtagggagaaattttcataaattaaagggtagtgatctgtggttcacacctgtaatttcagcactttcagaggccgaggttagtggagcagttgagctcaggagttgaaaaccagcctgggcaacaaagtaagaacttgtctctactaaaaatatgaaaattagccaggcttgatggttcatgcatatagtcccagctactcagaaggctgaggtgaaaggatggcttgagcgtgggaggcagaggttgcagtgagccgacatcgagccactgcactgcagcctgggtgacagagacagactctgtctcaaaaacaaaaaagaaaggtagtgataatgatataaagaagatattatgggctgggtgcggtggctcacgcctgtaatcctagcattttgggaggccaaggtgggtggatcacttgaggtcaggagtttgagaccaatctgtccaacatggtaaagcgccgtctctacttaaaaaaaaaaaaaaaaaaaaaaaaaaatttgatgggtgtggcagcacgcgccagtagtcccagctactcataaagctgaggcaggagcaggagaatcgtttgactccctaaggtggaggttgcagtgagctgagatcgtgccactgcactccagcctgggtgacagagcgagactccatctcaaaataaataaataaataatgtattatgtttatttgatggtgaggaaagactggaggataatgtggaaaggaacaaagggaatgatgtagttcagggttgctttataaaggactctgatacagaaggtaagacgtcccgccagtcagttcctagatgctgggcatgacctttttaatgagtccagtgccaaatgaaacaaggaatgccaaacatcatattagcttagagttccccaaatcaatatggactctcatgtacttttcctttagggccacagtttatgaaaagccagtatccaggtatttcattaaaccaagttcttagcttaggatggcattttggagacattttgctgtccattgtaatgctcattcattacaaacgtgccctcacagtccagttttctgccaggtaaggatgacacatgtttaactcctatcttcatggcttacacataggcagaaaattctgttgaataacataaatgaactattatgtgatagattaatcaaacaaatgaatcaaactaatgtgtctgctaaccatcatgcttatgaaatattacatgtgttgatcactctcttctcccaattaagattccactccaaattaatgaaatgatataccttcttaagaaaactcttttaaaagtggtgcaaatgccagaaactccaggaagggtagaaggaagacactgttcatgtgtaggagcctcaggtacccttcagtgctatcacatatgcactatttctgtccctgcatatgtggtactgagcaacttgttgaccctcgcgtgccatgtttccgagatgagaatatccccatacaacttgtgagccattaaaaaaaatctggtcatcttaagcatctagagataatgctttaggtcactttttctgcttcttgctctgttttgcatttgatgatgatgatcatcatagaaaatatttattgagtgcttagttgcttgtcaggcctatgctgaatgctttacaaatattttctcattgatgacaaccatgcaatgacacagcagttatactttccccgtttatagatgaggaaatagaagcttagccaggtccagtaacgtgtttaaggtcacacaacgtgttagtagttgaagtcaatgttgaagcccacattgccagtccccatgcaggcactgccaaccactacaatgtagtgtatttgcctgtagcaattctacctttttcagtttcatccccagtcctcagctcttcactgattgcttggacttggtgaaagctttggctgcaatggttttgaccttagaactcttgcttcagatggcacccagcctctagcttcatctgtttatagttcttcttagtagccatatactgctagaatcaaattcagacctggaaccccaggtcatttggttggcaccactcccaagcctctcctcatcttcaggcaaggaagagatcagacatacctggcctgggacactctctgacaggaaatcttaaaatttcacatactcaaactgatggatgaaataacatggacattctttgttctttttacttgcaaaggtagaactggacctgatgaaatagttggaaagcagaagctgtctccatatttagttagcctcaaaatacgcacaacctgagagctccctatttagctcaccttcctgcctctgctgcaaatgtttgctgatgctacagcttacaaagcacacatctgcaggggctctctgagcccctttggtacactctttcccatgattaggtaaatgtcagtggaaaatcaccatgtatttagtgttttaataaaaccacaatgttgtttattttgtaacctcaggttccaaaagggaaagaaacagccacattaaactttgcccctaaaactccagcaactccctccaggatacttataaatgttatcctactgccacccaagctacgttttcactagaccatcttccactgctaattctagtcgataatcataggactgcccagggtcattttcaggcttaaggaaagaaatagaatccagattgtgtgtcacaagaaacataactttaattcctaacttccagctctttgatgacaaggtcaccaaatgccaaacttagatcacggaacagtaattctaccaagaacacacaggcatgaaatctatctcagcttttacttcctctgcctggctttcagagagcttcattgccacctctaatcttattgtgaagcacctgcttcttgcactgcattgtctggcacaatgacaataatcaaggggtgaataaccagggatatgtgactatggagcccataatatccagggtggtcctaaggtgccatctcaggtgctgttgatatggccccccacttgtgcttgtcatagttgccacatgggcagtgggattttagtagacaggagagctcctctccaccctgcctttgcgtgtttctcaatgcttgtatttttaaaagaaacttggacagaagccatagataactaaaaatgcaatataccccatatatgacatacataatgacatatattaactcttatgcatgactatgatcagcatcttttcagagagtttcttgtttaagagggaggagaacccaatgtcattggatgctggagacctggagtgagcaaaaagggcctttgtagaggatgagaaagtgagaaagggaaaaaacagtgttcccctatcccacttttctaataaacccatccacatacacattgaatttacctttatagtacattatgagacgtccatatgtgatgagtaagttgggtgtttatcaaccttgtaactgaatattattatttaatttatcacatagctactgaactattgttattggtgatgtttcctggcaaattccaggctctgtttcatacagggttgttgttgttttctaattgttaccaaagcctgtgttttctctagtataaaagtttccctagcttttgaacaaacaatctaaatggaaaagctaaccttttcgttggataaaggcaagtaattggtttctctcatttcactgggcctttaggcatgaccatgagcaggggtcatggcgaaactctgttcagcagtaaataacttgttgtccatataatggctaaacactgaagcacagcagatgtccagattagctggcagaaagcaactgtattttggacatgcactagggcaaagaatgctgaatactagcaaataaaaaggataacattcgctggagctcccaacttattcaccatcaatattaagtacgtatgttaataacgacttctctgtattatccataataaatggaaagagtattaagctaaggaactgaaacatttatttggaagagaaaacaatgggatgagaatccacaaattggctcatggaagaaatcccattggagttgcagggggtggtaaagagaagtcctcaaatctctggttacccttccttgcatctgttaaagggataagaatcaagcagaaaattgtggccaagctcattgtcaaggtgagggctgaatcttctccattcgttagggggagctgtttagtcagcaggaatggcagtgggtaacagctggtgaaattcattgcctccttgattctgttggactcaggtctcttcctccctccttggcttccctggaagcagagctctctatttcctcctgtctagaaagcccctgtgaaggctagttgtcaatagatgttaaggcttgatttggctgtgtccactacatatgaggcccactgcattaagataagggttttctatatgattgctgagaccttttaccatctgtcctcagacccagggttattgtgcagaaatgaagaggaggagcagcaaggacaaaatacaaatgtctccattttagggctagatgccttattactcctaacgtctaaatctccaggaaccagatatagaaacatctattagatctgggcactgaggctgagtgggaaaggtaagaaaatggtggctaaaatgtctttactcctcctgatcaaatgaaaggctagtttctgcagctctgttgtagacctgttgcagaggcaggcacgagtagttagccccagctacttactactctttttcttgtttcccacagggcacttcataacttttcacctctgatcttatatagtgtttgcaatctgtgtcattcttatttcttaactatattttgttcgtattgctccttgtgacatgtctgaaaagctgactagccgtgctagggagtctaacatttaagagattagacatctccaggtggtatagatgctctgaaaacaaaatttacctggctctgaaaagatcagtcaagttgaaactggcacagcatgagtataaatctgagggtctaggaagttatgggatggtgttggtgttgaacaactacgatcttgggaagaaagtttttcagctgcctgtttgtcaactatggagcctcatactaatgtcccctttccctctcccattcctcttccttcttttactctcccattccacctccatttttctattttcttttcaaagtctcctcctcctttctcatgtacctctggtatgcttatttacatcaaagaaaactacttgttttactttttttccttcaatatgcctgctgaattataatattgatatgtatcttgttatgttaactggctgccgaacagagggtatcacttcctacccagctggaggagattttttaaaaagccaaactcagttttccaggattttagcaaaaaattcatctattgacccagttacaattctaattcttataagacaaagaaaaagaagtggatttacttatagaagtctgttaaaaattaaattaatatgggtgcatagcaaatatagttttattccactaataaattgtgtaggttggaatttttatgcattgaaaataatttaaaggacaataggcattacatatacatttatgttctattgtattaattggaaaaggatgaagaagattaaatgctggtgatacatatatatggaaaaaaggaaatgaaaaactgagtgcattcccagaatgggtttgaatccactcacattgcctgttcccagcttgtggttgtaaattgtttatattattagctacaggagtatcctatgtaaagaaggcaaattatttaaaatggagctagcactgtcttcaaacaggatgcaccattaaaataaactttgaagtcgtattagtctcttttagaagaaaacagctctataacacctgatcagttatttccagggacaagcacttctggtagcccaccgaagggttgggcagtgcttccctggcagatctgcacccctttgtggcagttctctcattccagtctccatctgcccttcctttgaccaagctgtctttggagtactgctttaacttcctttcttcatctcaacctgcatttggatataactaattcagcttgctgctgagcacagcaagaaatccacctcagcaccccctgcacaaactgacttctgcttttacaaaaccagataccaaactggtttcacaatggagatgttgaacataaaagttggctccatcataatgtccacccggtggttatgtgaatggttgtttataacttgtgttcagctttctagccgagcactagtgtcgcctaaaattgctactgtgagaaaaccaaaatgctattttgtaaacccagactgttcatctaagttttggaaaactgctcttctttctgcagagcttgctaaagaaagataaacaactctacccagacaatgggaagctggggagcactggctctttattaggttacacgttactgtagggatggccagaaatgtgtgcttaaaaggcatttgccttcttgtggggtaaaatatgttaagtacccccaatctcctcaaacccctcagttgaccctttgtaaatttgttactgagaaattgttcagccccttatttttcccatgatcacatcagaagtacaatttggatattaaggcatctagtgttcttctactgtaactgtagtttaaacaacctatttgacttaaattaatcccaaactgatgcctgataattaatgatcagtggccccatattcacctataattacttgccaggcagccccttgacttctaaagaagctgtatacgatgagtaattgcatacctgaagatatgctggatttgtgtctcagggcagaatacaattgtaaataatttatttgacccaccttgaattattaaattttaaatgagcaaattaataataaaatctatgcaggatgatagtaataatctaatttttccatttagcatggattttgaatcaaatatataatttacatggtgataataaatttgtgtcttaacgaatgaaatgatttcagggattggctgtcatctttggaaacatcagaaaataggtacaagtggccacatggggaaattcagtaattcctagcaattcaatgagatggaaatagtaaccttttgtagctgcttgtaagcacctcctgagctacagggatgagaaacagagggtaacgcttgggatcggggtggatggggttaagctttttcctggagacacgtatcagagcccatgagtcctttcagggaagcagtgaaggatatgtgggaaataagtcctcataaaatgaaaaacaaaacaaaaacaaaaaatcattactcagtaagtgggaggattagacgttgtcagtagatgttctaccatcctgtggagtcaattttgaagtaagggaggcaaggagtggctgagtcagaagcaggaaagtgtctgggcatagaaatggaaaatttgtctggagtctaggaagtaagtgtaatcttataggtggcctctagtcccttccctaagaatctaagaggaatattaaggtttttatggctggtgagaagggtaggaacatgtcataaaactacttctgcatttccttttagtcagaaggtggtatttgtccagactggtgtttgggatacctatttgttttctgagactcctccatgtttatattaaagtttttaggtgaaagtttataccacctggtccctttccattgaatatattacctggaaatgttgttcatgggaaggaaacctaaaagcccatacttgaaccgtgaaagtagttttgaagcagcttgattggtaacagaaatagaaacacgattctctcctttatagaagcagtgtccttagcaagggtggcttccaaaagaagtgtgtttaaagtaaatgttgttttccctctgcttccatttaaaaatcaaacccacattctcaatgttgaagattgaaaggccaggcacggtggctcacgcttgtaatcctggcactttggaaggctgaggcgggcgatcacctgaggtcaggagttcaaggccagcctagctaacatggagaaaccccatctctactgaaactacaaaaattagccaggcgtggtggcacgcgcctgtaatcccacctactaaggaggctgaggtagcagaattgcttgaacctggaaggcagaggttgcagtgagctgagattgcgccactgcactccagcctgggtgatggaaccagaccctgtctcaaaaataaaatagaataaaattcccctgggtattctctgtgcctcaaacttgatgaccacttcaaagacaaacttcttactagcttgcttatttcagctaggacaaagtattgcataaagatgaataaatacgttattttccaccaagtgctgcctccaaaccctaaggtgctatggtttggaaagataaaattctgctaaatgaatccagatttgacttaatcagttctgcaatctgtgaaatgggattacttgaaatgacagagaactctattagaattaaactctgttctgatatcacacaatttaataaataaactgctctctgggccagttcctaagtttatatcttgctttcagacataagctggacattatggaaaccacattgactctgacagtcaaggtaagcagtttgtcgtcagttggcaagggatctcggaagacatacacttcgttttcccagataattctcttctcctccaaccagaaattttgttttaaaacagagacagaaagggtagaattatgttggaagattttttctgcctctataactgccgtaacctggaacataatttccaaaccagctgtgaacttttgaacttataaagcctttattgacacggttaactggttaagacgtcttttatattatctcactaataaattaattcaaattgtttacatttctctgaccaaatttttatagcttttgggatagaaataatgtgcttgagggagctgcttatgccttcctcaaaactgggatttgaaaggaaggaagatatctgtgtatattaagtcatttatttaatccattcaattaaatctctaaaataataggtcagtaaagatacatcgagtaacctcactttataaagggtactatcaaaacactaagggaaatttcaaagtagagaagaagcagtatttgccttagaaaaatgtgtagtctatttagggagaccaaccaacctcacagataagaaaagcatataatacttggaagaacataaaaagaataagcaactgagatgaggcaaattgagcccatgtatgctaaagggatataaggcagaggcaacaaaaatacagatgagattaatcagagaagtcttcctggaagaggtgaactttaaataggattttgaaaaacgaacattggagaggaatttttaatgagagaaatagtcttcacatgagacatgaaatgtaaagtgctgagcagaaaataagattttatttttttaattttaatttcatttaattttgttttgagatggagttttgctctcgttgcccaggctggagtgcaatggcgcaatctcggctcacagcaacctccacttcctggattcaaacaattcttctgcctctgcctcccaagtagctgggactacaggcatgccccaccacgcctggctaattttgtacttttagtagagacggggtttctccatgttggtcaggctggtcttgaactccggacctcaggtaatcgcctgcctcggcctcccaaagtgctgggattacaggcgtgagccaccatgcccggccaagattttattctgtagcctgggtaagtttcacatttagaaatatagaagaagctcttacatctgccatagtttgattgggtaattaaaactagagctgaaaaaaggaattacaaaatataaagcacatatcccttaagcattttcttttaacttcaaacctataaacatacacccgatgacaaattttcaacataatgccagaatgttttctttgagttcgagtctctcttctttctaatgactcttttgcattaaccacacccacatgtattatcctcagtttccaggttcagtcccttggaagcagaatcagaactctaaggcacttgctaagcaatgtggacacaatcttctactctggcttttatttttcccccaaaacgtttgcagttacattacctttacagaatttgttggcaggttctttagggacatgccttcagaagaatccacatcaatgcaatttccatgaaaacagctgtttattttcatattcatatttaattcgttagtttattttaatccaattttataaatgctgtaaataaaatagccacataagcagatttaggaacatacacaagcgactgctagaacgtagacaactcattttatgggcatggaagtatacaggcttactaatgagaatctgctgaaggagagaacttaacatgtggaatgtctcattacatgtatttcagatttcagtgatataataagtcagttaagtaaagatcagttgatataaagatatctattgaaataactattgtaataaaatgatgaaggcaggctcaaagatgaccctagacttaaaagtcagttgaaagcaactctagagcttccagtcaaaatagttggaggtgatcatacttcacccatgactccagtctctagtgatgataaataaaatgctaaaaagagaaaattaaaacagctgcaattaaaaaacaagaaaaacatctttgtggccagaaacataagagaaatgcaaaaatgtgaattaagccaggctgaagctaccagcctgaagggctgaaggccagaattctttggtagattttacactttgaacatctggttcaacattactgcagcagaaaacttggactatgtctacatggcaaaaattacaatggattgtggtagatttacaatctccagaataaaccatttcaaagcaaattcacaggttcaaccagaaatttgaacaatccaattagaggcatcatattcgtggctttggctcattactggaaacagccaacaggtgctatttttatttttgaacaagagctcatcacagataaccattgcacagttaccacgaatgacctcaatctatgggatctttcttacccacatcagtctctggagtgacgcctatagcatagttcctgaaaccaacctcattcatgctgcagacccaggaacacactagctacacctgtggccctggggatattccaataaagatcaatgggaagagggtccttctgtaacaggagtgacttgagggctttctttaaaatttcaagatggtctatcaaaggggcatcctggagtttattatcaatgaaaatattttttagcagaggaaagatgagtaaaataacagttgtgacccaactctaaaagaagaaaacatacaactgtatgtaaattcaaggtaacgtgatattaatataaagttataggaaatatgagttttaaactgtaacattttatattgaacttgtagccaccatgaacaaaccttctgaggggtgactaaggagtcattgggaacatatgggctaactcctcttgtgcatagttagaaatggtctttgtcctacttggcccctctctgctcttcattcagtgaagatatgttgaatatttagtctgagtcagagtctgtattgggtttagggagggcacaggtggataagaccctgtaaatgttctgaggttattttgcattttgcttttcttcttggcaaggaaccatttgatgaaataaataaagatacaaagaggtaaagaatcactatttcttgctttttgtaaagtgtcgccatattaacatggcaaaagaaatacagtaatagtattattatatataaactatctatcttgcaaataaacaattacatgatgagtcaagccttttaagaaggggatcactactgggtgcggtggctcacacctgtaatcccagcactttgggaggctgaggcgggcagatcacgaggtcaggagatcaagaccatcctggctaacatggtgaaaccctgtctctactaaaaatacaaaaaaaattagccaggcatggtggcgggggcctgtagtcccagctactgctgctgaggcagcagaatgacgtgaactcaggaggtggaggttgcagtgagctgagactgcaccactgcactccagcctgggtgacagagcgagactccgtctcaaaaagaaaaaaaaagggaccacaaagctgtgtttatacaaaaagagatttctttaaaagtaaaaaccaagtccgcaaacatatatagaactgtataagatcacacaaatgctgctcaatataggtagaatatagacatggctaagacaaggtttctgtcctcacagaatgtgaagcctactagttgaaacaagagaaaagcatgggatcagagggacaaccctctgcttgtacttaactcttgcttgttagtcctgtagtaccatttggtgaagacaagtgacggagtcttgttctgttgcccaggctgaagtgcagtggcatgatcttggctcactgtaacctccggctcccgggctcaagcgactctcctgtctcagcctcctgagtagctgagattacaggtgtttgccaccacaccaggctaatttttgtattttaatagagacaggtttcaccatgttggccaggctggtctcaaacccctaatctcaggtaatccgccccccttggcctcccaaagtgctgggattacaggcatgagccaccacctggtcctaatttttgtccctcaaaatgatccagggaacttccctttgtgcctgtcctgatgaggacaatatctcagccatctggcacttacagctttgatgcaactaagtggttctaagctgatcctctatttccaaggacatagtagattgtgattccctatggtcgaggaggtatgatcctggtttcttcatgcctcagctcgtctgggaagagttgtgggcaaaggtttctagcagagcttctgattcatcttgataattcattaactcagatggcacatatggaaagtacaggaggatgtgagacgatagtgcctcccatgacgagggaagatgggcacaagcactatgattggtctctaactcctatgccctggctcatagttgattttgaaaccggccagtgctggccttcctcaaggggtcatactctttcactttgagatcaggcttctggtatttccacatgtggcactgccaggggcctggtacaacacagtagtagtagtagtaataataatttattgattgttttctatgggtcaggcaatgagctatatgctttaccagttttaactcataaggcataaggaccctgagttaaatattaaaatcaccccattttgtaagataataaaaattgaagctttgaggttagctaatgcccagattgaagctagagaggtcagctagtggcccagattgacatatcaaggaataagactggcactcagactctgctatgtctgattccagatgcaggtctctagcatgctgagaaattttagcacacattcaatttctcataacaattgttcattgttctcaaaagcatctctgtatatctcatgacccaaattcaagctcctgcttccacaaagcacatgcacatatatacagattcacacacatagagtgtttttccacgatctcatttacaatgggctccgttattgcttatacccagtttaatttttggctgggcctttaaatactttttaaatgttaagaattccagggaccttcacaaagaccaaagtagcagggtttaagttttcccacaaatcagaataggcaactgccagctttcacacgaggtcctcccaacccagtgacaacagttgtattaaaggaatagaaaagcccaaacattgtatgcatgtttagtagtgcataagagctactttaaaacagatttggaaaaaaagggcaaattcaaaatatttgctgcatttctagcgcctattcactaggcagtctcatgttgttttgagctcagaagcttggttctttccccacttcacctttctcttttccctgaaacatctttatctgcttcccactcttccatctgtcagaagttcctgtttgcctttgaaaggatttctcggcaagctgacctctgtggatttcatcagccctgcatgcttgcacatgctgtgactcattttcactaatctgtgcaatgagcagtgagcaggggccagcagaggccctgcagcctgcaaaggactaatcagctaccaactgtggcatatgaggatgtctgagtggagagctccaaacgcctacacgcctcatgcccagaagctcctccttctgtgtcccccacccttattttttgctcttgaataagaggcatgaaagcaaacatctctagcccggagtaaggctcacactgccaaaaccatatagaggagtgtgtagttattttcccatttatctatttcagaattaacatttgattactaaagtttttttttttttttttttttttttttttttgtaagaaaaagaaatatgtttcctctagtcctggcagatcatttgttgttttttctcactcctcctgcttctctcaagtgtatttgcaaaatgaacgaaggctgatttctagcagaggatatttcatggcttagtttctcatgaagatgataaatcagactaggtgactgaataattacattcatggagctggactgtaattttttttttttttttttttaccatagaactcataaggcagcgttctgactcattatatacaacagttttcataactcatgcaaatattgcatccaacttttggatagaggggtagttttaggaattttcatcaatacttaataacacaatttacactacaaacagaacattgtaataaagaattcaagagcagataagtgccattaagtcaagtaaggggcttcatagacctggtttccatttacaataccttgtctcaagacacatgaatatacatgttggtatagtcatagtagacattatgctctttcattgtactgtgaaggcaacatggtctttgctctgggaactgagagtaccgaattccattttaatttccataaccaaattgctatgtgaatttgtaaaaattcatttctttttgttttaacagagaaaagcaccacctggcctctgctttccctgagattatttttcatagcctgctttgactttgacagagaaatgtatctgtgtgttcatacgcatctgaactcaaagcgtacaggtccagaggttcttccttgctttttatatctgcttactcccccaagaaaaagactcatgtacattagaactacagcaataaagaattttttttaaaaaaaacaagaattatcaagaattatataataaatttggaactgggaaatgataactgtaactgaatcccaagtcaaggacatctgctccaaccaggcataaaatttagccttctgcttccaaggagttaagataagaaataggatgagctacctagcacttattatgttagcaaggaattttgacaggggttgaataataatttgagcacaggatttagtctaaaagcctaaattcaaaataagttttaacactaactagttgtgcagcattgggcaagtcatttaatttctctgggctttaattttcttctctgtaaaatagatttgataatgcatacctcacagagtgtttacaagaattaaatatatgtgtaacatatgtaaaaccataggacaatgcctgggatagtgtgatataatatatcaataagttttgatgccattaggttcaaggggctcaacatctggtagaagagataaaatatctacacagataaccataatttaaggtaaaatgacttatatatcctcaaagtggtgaagataagaggtaacaggaaaagcttccaactgggggtagggacttgggggaatcaattattgcaccatggggaaggtctgaagggtggaattaaaagaaagctaagcagaaggagacatcataagctacatttgcccagggtcttcacgaagcagacaccaatatgacattaaatgtatgagcattcagttagtggaatgcctgtgagcaaaaatgtggagttagaggcgggtgctgggagaaatgtcagaccttaatccaagactggcttcagggaaggagaggggaaaagtcctagataggcgtgcagtctaatgaaagttccgcaaggccatcggggagtcctggagccaaggttggctgttagcagaatccatatctcctaggcatggacctgtcttagtatttttacctgctcaggcattggctggcagttacctatgggaagtgtgacctctgggaacacctggtgccaggtttcagagggcaatagctggaggccttggtcatttcccctttcactagtagaagttctgccaggcacgttcttatagccatttaataagcacaggggctagaatgggttgttttagccagaattaaacatcctacaggccagttgggcttagacacagagccaagaacatttatctgtgttttgtttatttgcaaatgcaataggggtaagggatggcaatgaaggatgcagtggcaacgacgctgcccctgcaaacactgtcattgtgggtgttggcccacactgaggcagcccatccttgtgcttcactgcacgggccctgctgcgtgtggctccatcatgctcccagtggcttccccttatcagaataactcaaagtcagcttatagatgtgaccacatccccagaggtaagttgccttctaggacaccaaaaatcctttgtgaagagtaacccagaaagggcagtgggcagtaaattccaaagcatatccctatctgataattatatgtgctcatctctagcactcagtcaaggaaatttaagggaagccttgttattccattttactgatattaaggttgaggtgcattaaagttgtaattttcccaaggtcatgcttatactctgctagtgaaacaaatggaaagaaaacagaacatgaacttggaggaactcagattcaaccctggatttgcccattactagttttgtgaccttgtattagtaccataaactttttgagtcccaacatgttcaagtttaaaatatgaacaataataccaacttcatgaaattgttgtcaggtttaaatgaataatgttgaaagtgcctagttccacacctagtctaaaggagaaattcagtaaatgctcatttatttcttctaattatatgactaactgattagttcaggtaacagttacatcaggacaggcaaaggtaagaagaaaaatcagaaataattttagataaagttgggatctcattattccaggaatatgagaaactattgtgtggttaacaataaagatttgtgcgctcaacaaacctagttcaaaattcaggtctgccacttactagctctgcatcattggagaagtcgcttaactccctgaaacctgtttcttcatctgtaacctgtgcataatgagagtagcaccctcatagtgttgttttgtaagaattaaataaagtaattttttataaagtactaagaatagtgcctaagctctaatactcagaatagtggtaagcacttaataagtgccattattgtctaaaaactatattagtattttaaggattattatttttattatttagtagttgtcctagggctccctggggataggtaggaaaggagtggggctggggagctctttcaggcaccatttcctgatcaaatccatagaatatgcacaaccttaaaaaattgaaagtggtagagaaggttgttaagagcaaacaaacaatcaatgaatatatacccataaaattaatcctggggaagttgtatacacagcctgagttgtttttatattgatattcttttatttttttggcttccctgagtctgtttgcagtcgtccctcctttacctgttgtttcactttccacagtttcagttacctacagtcggccacagtccaaaaatatgaaatggaaaatctcagaaataaacaattactaagatttaaatcttgtgcccttctgggtagtgtcatgaaatcctgtgctttccagctccatcctgcccagctccatcctgcccaggacttgaatcctccctttgttcagtgtattcacgctgcaggcactacccacctgttagtcacttagtagctgtctggccatcagatcaaaaaaacgtagtatacttagtatatataggctttggtgtcaagcgtccactgggggttttggaacatatctcttgtgaataagggggagactcctgtacttatttatatctcttacggtcaggaagctttcaaggatatataaaatccaccactgtataaattaaaattaaatgtaaaagagaaaaggagataggaggaggcataatggagatgcaggaatgaagataaacatgatggcataaagatttagacacttgccacaaatgggttagacatttggctccagattttctaggaggtagaacttaatcagttataaaatcttaccaataaaaatctgccatttgcttaggagcaacacaatgattatctggtacaaaactcatcagatacaaatctgccatttcagtaagcataaggattatttggtgcaaaagtaagtaatgttttttttctgcgggtccaaataaggtacctatggtgaacaaatgcatgaaacaaatgtcttagcatcatctgttccacagacacagtgaattctataaagctgttcatgttcttagaagcaacttagcttctctccctcagttttctcgtatgtaaaatgggaatagtattcgtctctactttatagaactgttgtgagactacattagttaatgcatatataaagtgcctagaatagtgtctggcacatattaagcatcatataaaggttgactgttgctattattaggagccaccttaaggagactttgacatttcaccaaagcaaaatacattgttctttgtgaaggtatttcttccacatttcacattctactttctgcctagaggagaaatgaactctggagaaaaaaaaaagacatcactgaaatgctttgacccacttattccatttctaggaatccactcactcacccctaaaaaagaatctaaaatacacaaaactttaatgtacttagaggttaactattgaggttacggtaaaagataaagctggatgcaaatcaactttcaatgcaaaccttcaacataaagtaatgattaagtaacttaccctatgtcaactgactgcataaccatttaagtcattattgtagaaaaaaatagcaacatagaaaacccgaagtgtcttaactctccacccagttgtttaggctggaaatttgggagtcaccctttagttcttcactttcctctctctgtgtatgtaactcattagtgagtattattagttctgcctccaagatttatttcaaatatattcacttccattttactccttgccacttttctatccaaaaagactattccaactattttctcctaatgccctctcccagcagccagagtgagcttcaataaacataattcattttctatcactccctacttaaaacacttcaattgttttttcacaagctcttttagatgatctttatatactgtctctcttagttattcccatagtaatactgaccgacaaactaccccaaaactcagtggcttaaagtgataattatttaatcttatttaagaatctggaaatcagttggaaggggctgatctcagtggggcttagctggacttgatgccaagctgcatgttggatccatgtctgctacacatccctcattgtcctgctaccagtggacaatctagtatatggtctttcaccacagtaacacaagagcaatagagtgagcccaactgtgtgagcacattttaaacctcttcttctattatatttgcttaagtccccttaactaaagacatagctgagcccaaactaaagggttagcaaagtgtactcagccaccatgaaaccaaaacaagtcacatggccaggtccaacatcagtgaagtggccaagtatattcatttcatgaaattgggtaggaaagagggagtgaatatttgcctaaaagtaatccaccacatatgcctttccacccccatttgaattgctcaccttgaaccagcctcaccggtttttttgtttgtttgttttcagttcttcaaacaggacaagctctttcatacctcaagacatttgaaaatgtaattccatcaagctctaagtctttgcagagctgttcttcctaattttaacttaaatatcgattcctcaggtcttttgtgaagacattagtaggtgataacctcctgtgattctctcagcatcttgtttcttcatagcatttatatcagtttgttatatttttttactagctttggaatctgtcttccctactagactgagtttttcttccatttttcatatcgtttgcaattttggctcctatttgcaattaataaccgagaagcaggaggatgcaactcagaagcagagtcaagagtttgcaaaggtgcacatgcagctgaaattctacagttgcccaattctcattatttccaagaagattcttgcctccagtatgagctttccttcctgaatttggcccttgcttcttcattttactagggtctaataagttaacccctttgccctgccttctcttttgaggatatttcctcttaagttgtgagatattccaggtcctctaccagacagcagttcataaaagcttccccctagtaagtcaccagtaacccacacaatcagcctcctttcctctgctctctgagctgctctttggtccatacacactggatactggcagagctatggccaaagccaggcctcttgtctaccactgtggaactctttcttgggatggaaaacatcctaaatgctaggtcagtttataccaaggcttcactcagctctaaataagtcctgatagtaatgagtcttccagcttcctgctggagcttatgtgatggttccaaggatcaatccatcagacaatggttcctattactgcttaaaagacaatgtcaagcagactgaggagaggtgactctgtctaactggagtacttcggtttccagttggctggaaattattactgaattgcaataaactcacactgactggaatgacctatcaacactaaattgaactgcacatttcacaaagaggcccaagatgaaatttagggacagaaacaactattgatttttttttttttttgtaagaggagtgaaactagctattgtatgatttctacacaaatgcattttttgctgaatgtttcttgtgggagtctctactgaagtatgcaagggtcattagaataaaggctagattttttgaaaagaaagaaagacaagtttgatagttggtacatttttagaaaaattggaattggaaccaccagctattcatatttacactttcccccacctctgttccctcaatatctctctcttcatagatatatttactccctaaaatgcatcttaaaaacaccaccatatgcttccctgggctcacacttaattcccaacacccaccccctttgccatccttctctatccagttttttaaaaaactgtaaaactactgtccctgaagaatctcattgcctgtttattaaaggtgctgttgtcaccatttccaccaaccactcgttcacaactgaagttcctcatctgaaacatagggcacagaaaacgatctgaatgacagttttctcagttcttctgaggatggcacataactagtaccattctagttgcacagaagaaaaatttactgcaaacaaaggatgccagaataatggcctccccccgccaaagatattcacttcctaatctctggaactataaatctgttactgtatatggcagaagggactttgaagatgtgattaaattgaggatcctgaggtagggagatgatcctggattacctgggtgagctcagtctaatcacatgtgtttttataaatcaaagaaggagacaggagggtcagggtcagaggcagggacagatgtgagtatgctatgctgctggctttgaagacggaggaaggtgaaagattgccagaagctggggaatgcaagcagcctctaggaactgcagagtgaggaaatgaattccctctatcccccagaacctccaaagggaacacagccctgctgacatcttgagttagccctgtgaaatttctgggctaaaattctgacttctgacttccagaagtcgaagataataaatcttgttggttttggccactaactttgtgataattttttatggcaacagcaagaatgtaatacagatgctctagagagttcaggcttaattctctgcagaaactccagttgaggaaggttgtcaccaggaaaacaaaggcttccaatgaaaacaagggatatccccagttgccattggccattcagatagccacgacttatgtctctagagagagactcctgtcctgcaaggatgttatttagtcctgttcgggcacctgcatgtggcatattgagaacactgcatttctgaattgctgctaatcaagaagtcttcagttggcctctacaaatggcttcgccagtcccaaagaattgtcaatggcagaaatgtctctctcagggtagtaggaaaacatatatgggcattggaaaattctggtatttcataagcattcacagtggaatctagaacctacattattctaacataatcacaatcttatccttcaagcatatgcattgatcatcaaaaaaataaattgaaatattctgcaatgtctacagagagttttcttgggctcagctaaagatgcagactcacgatattaccctaggagatacttgacatcatacttacttaaggaccttgatgggaaaccaaatatgccagcagtacaacctgaggtatttcttttctgtgaaagtctttgtgggaattctgtgcagcacagcccaggtgcaaggagatgagatccacatcagccaagtgcctaaaagcctcattcctacaagagccattatctgttggggtgacagcaacgtaggcataatttccagggtcttcacaaaggccatggcagttacaaattcaccacactcaggaagaccccaagtgtgacttcctatcaaatatatacagcttatgtataggccttccagtgttaatcatgggatttgtgttaccataaacaacactggttagcagcatagccaaccttaacagggaaacccagcgtgaaatttaaatgaaggtcaaattctcatgcagaagggaaaaggctatcttaactctttactcataaatatgttagaagttgtccacttccatgcataacactgcattattaacaatgttgtcattgttattcatagcttctgtttttgaagatgaacatttatgtaaagctttgtgctttatccgcactggcatgttatataaatcttatggagaaggtataattaatgctatcttttcataaggacactgagattcagagaggttgagcaaatttcttaaagtcttttagcaagtgagaggcaggatagatatttggaccccactctccctggttcttatacctactctcttaatcagtttgctgtcttcatcctcctggttgctaaagccaagctgtagcccttgtcatgggtacattgtctgcatttaggaggactaggctccctcaggacttgggtagctttcttggtctatcatagtccacatagccagtttcattagctaaagagggcatttgctctgtaataaatgtgcccataaaacaaagaatgaatttgcacatgcttagtttctcaaactgaaatgggctatctttaatggtttacaaaaaaagaaaagaaaaagaaaagagctggggacattcaaacacttgagcagtttacaatggtcttttctcaattacatttaatacttagtacaactttgcaaccagaatgcagacagattctgaagagtgctggattcgtatcaaaagagagtggcgaattagttggggagaacagcctttaacttcatgtgcaaaggaagacttgaatgtggaggtagtgagggtcaacggtattcactaatcacttccctcacaaaaaaggctgctttcagttcttgctgacatcagtgggaatcctaaatccctccagagcatttcagccgattcctttcacagcaggatcactactgtttcacctcacttttgaaattctgcagtcttcactagccatttgctggagttataaatgattgtctgtctaaatcaacaagtggtaaatctcctttagttataatttgatttaaattagcttaccttgggaagcagaccgccacacgtgcaaattaccataaacagcagtcctctttgacgatttacataattaaatgggagaatattaagacattatgtgaagtggcaacctatgatgcctttttttttaagtgaagaatagggtaattcttcacttccctgttgtcattttataccaaagcaaacctcattgtgatctctgtggtcttagagatacatttttctgagatgccatgtccccaaatatatgcagctttcctggacagttttaaaaactgagaaatgaggaaattcccaaatacataaaggtatatctgatctataagattgcatacacaataggtattttgaaatgcagaaaactaaaaaagacaaagtgcttcaattagttgtactttggaaaatacattatactacactgttctaacaagcacagtgagggggaagagattttcttcaaagagtactcttgggatttcaaaaacacttctgcttttggggactgagagttttaaaatgtcattggaaagttgtgaaatttaacatgcaaaatcttcagtggctttgtcaatagagaaatcaaatgaaatagtctaatcctatggaacagagcaagccctggttttcaaaccagaaggctgtgcttaagacatttactgtacatcatttttctttttcaatcatttcatggattgttggaaagacccttcgttaattattgagtggtgtaaatataacgcattattttgaaaggaaaagaaaacatttgggtgtcatcacctgcttctctggagaatacacatagtcaagagaggacctgtccagcaggcaggagctatcatgtggagaaatgccctgatgcaatggtatcctccaagtccaccaccaggcaagctataccagtggtcctggaagacaaagaccaaatgctgatattcaaatcaacttaaaacacacagaagaaagcaaggagcatagaaatgcagtaggttcgtatacctagcatagagggcaggcacagtgtaagggtcacttcacctacatctcatttgtacaatattcatatacaggatcagctactcaatatatggagctgttgtagattgcatgtttgcatccctccagaattcatatgtcaaattaactcccaatgtgatattagtaggagatggggcctttgagaggtaataagaatcagatgatgtcttgagggtggagcttcatgatgaaattcatggttttataagaagaggaagagacaccagcaaacaccagagctttttttgtctcccatgtgaggacagagcaagaaggcaaccctctgcaagccaggaggagagccctcaccaaaacccgaccgtgctggcacctgatcttggacttccagtctccaggactataggaaataaatgtctgttacttaagccacccagtctatggtattttgttacggctgctcaagctgactaagttaggggctgtattagtcagggatctctaaagggacagatttaacagaatagatatatatatatatatgaaggggagtttattaggagaattgactcacatgatcacaaggtgaagtaccatgataggccgtctgcaagctgaggagccaggaagccagtacgtgtcccaaaatctcaaaagtagggaagctgacagtacagccttcagtctgtggctgaaggcccaagagcccctggcaaatcactggtgtaagtcaaacagtccaaaagctgaagaacttggagtctgatgttcaagggcaggaagcatccagcatgggagaaagatggaggccagaagacttagccagtctagtccttccgcattcctctgcctgcctttatcctagctgcactggcagttgattagcccgtgctcacccagattgagggtggatctgcagctcccagtccactgactcaaatgttaatcttctttggcaacaccctcacagacacacacaggatcaatactttacatccttcagtccaatcaagttgatacttagtattaatcctcacaggggcccagtgcaaaattagaatacaaagccttttgtttaaaaagcaggggggaatgccggcatattaaaggtactaaaatatcaagattggcctttgatctgtgtctccttttctaacacatgctccattgtaccatcaaacctcccttacaaaacacaagttcaaagaaaaaaattattaaggatatttcaagaccacagaacattacaacaagtgtggggtcctcttgggcctatttataagtcccttctcttccccatcaagtatttctgctgatgggcttgaaccatagtagaggttgaaggactgaggaaggaatgggggaaatggccggctctgatttggatacagtttagaaagccaagccctcttagacatctgtgtagacaacctgtggaccttcttaggcctaggtagtatgtgggttctgtgctcatagtagaggtcaggctagaaataccaatcagaaattagtctgcatgtagagcttatttaaagtcataaaccaaatgaagtcaatagagatatgtagacaagggagagtttttctccctagattgcaggccttatgagggcagatagtgtcctttgactctttttttttgcagtcctatcaatgaacaaagaatcttacatataacaggtgctaaataagtgttcaagaaaggaataaaggtgtaagcaactagttattcaagagtcttatttttctctcagagtctttctgaactcctaatttggagaggatttgcttttccagcagaaattgtacattgatatactatatgcatgcttgttagaggtgattttattgttttatttctgtaaataattaacctgttttccatgctttctgtgatactaattaagaatatttagtgtggaataactcattcagatgaaacttcagcatttccttgctttgtaccgcttgccattgaagatgttgtaacataactatgatgtcatatatccattatttccaggagcttcataagcaatttccagtggctgtttgcttcactgtttgttgagatttttttcctctggaaaaatttccattgctgttttttcatttcctttggaaagggaaataaaagcaaaaatagaataacagtatctttcaaaatgtgctttataaacaaatatgcttataaaccctgggttcttaaaccgctatacaaattgaaagggtgtcagcactccctccattccccaacccccaacactttccctagcaaaaatccgtagcagtttctgccttaagaaagatcatttaatccaagccatagcatttgtgacttggctaattatgaaatacaattaaaaaatgattaagaatttttcccttcttagccagaactcaggaagtgttctctttgttctcacctatttaatcaccttcacagtcatttccaatctagctttactccttttgacatatcccaaaatagcctgtttaattctggccggagatgttctttcttcttatctgatctggctctgtctctgctttattggctgctatcaaataagatacccttttaaaccatctaaaatcacagatgcctcactcttgatactatacatctctggacttctgcttttctttggtgagccttcagggtaggaccgcaggtcgtagggtctgtgtctatgccaataaaataaacagggttttgggagggggatggttttgtgggcattttttttaacatcctggaaatgctgatgaaattcagttcccactccctgtgcccctgaggattcagctgagaattttaaaggaagggagagattcggtttggcacggaagagggaagatatcataaatttaagcatagaaaaaaggcatgtgtgaaggctcaaaagtaggagaaaggaagtgatatcagaaagtgccacaatcactcctttgtcctggtgtcaggtgagatctctgagtagctgtcatcaccctctcagaaaccaacctgatgcctttgcctttcaaactcagataagccactgtgactgtaaggaccctcatccatggaggatgtgcaccataatgggaaggaacaccggctcaggagccacacttcctgagtgaacttccagcggcataaccttggtcaagacacttaacctctttgtcccttaaaaaaggccgtcagaatacattactgaaatactgatttgaagatgttttaatcaagatttatgagccaccaccttgcccagcactttcacgtaaattctttacatgagaatagtttacaaattcacaggcagtctaaaaatataaacttctatatatttcctcagttaaaaaagaaaatctcctttcagtttttattatttcccattattatctgcattttggagataaaaaacaacaacagaaaataaaagaggttaagtgatttgctcaaggtcacatagctgataattgcaggcctcaaacccacagtgagctttctagtccactgagattcccatgacagctcagctcccaacaatctgcttgtaatcaagtgccaaagcaacattaaactttccagttctcttaccagccaccatcctgctgaatctctccagaatcttactccactcagggcttgataagtgtacatccaccgtctgaacccatctcttccaaaattctgacttcctagacttgaattcctttgacttcctggctgatgccttggatctgaatttctgatcctaccaaatgtggaggaccaataaaagaggatttgcttttggtggcttaagaatatgaccttccacaattattacttgccattgtcagccgagaggaacttatgcccctcagcaaggctgaccctaaccagtgtcttatgctggggaacatgtggttgtcctagccatggctctgcaaggagaagctggggactaaaggacagaaacaaattcggatgataattatattatctcactcattaaagtggacttgtgtgaggatgaacatcaaacaaaaggacagaatgtcggaagaaaagacatgtgaaagaacatccctgagagaagaaatggttagtgaggtcagtgaaagcatcgatgtgtcaggctcacctggtcccagatttgagtaaacacaggaacacactgcaaagtgttgttggatcctaaatcagagaaagctttaaataagaatagttagagtttaggtcatacactgagttgtgtttgttttgaataattttatttttatgataccctcctcaccatccttaagctatttaagagttcaagttagccctatgaaatgttttccagaattctagagacttcatattggaagatggtgctttaagtaaaagaaccaaaatcagagcagcaaaagctacttcccagcgaacacactgtagaaatccttcctgtaggctgagcgtggtggcttatgcctgtaatcccagcactttgggaggccagggtaggtggatgacctgaggccaggagttcaagaccagcttggccaacaggacaaactcccttgtctactaaaaatacaaaaattagccggtgtggtggtgtgcacctgtagtcccagctactctggaggctgaggcaggagaattgattgaacccaggaggcagaggttgcagtgagccgagatcatgccactgctctccagcctgggagacggagagagactctgtctcaaaaaaaaaaaaaaatccttcctatacacttttatttaacattccttgcaatgctatgaggcaggcattattcccattttcttaagaggaagctgacatttataaggacctaatacaaagtgagagattattacaggctgactgtggttgagaatgctctggaattgtagtcaggtcttggttgtccaaggagtcttttgaacctactcttcgaaggatactcagtgtatcaaacaactagctgtttctatttagatggcctgtggcctatttctaaagcacacatactggcttactggctttcatggcaggagaaagttgttttcaagacctgtacttaaataaatgagtctgacatcatgctgtggggtgaaataattcatacaatatcaggcaggcttttgtcaaagaacttctaacagagacagaacagcctgagaattaacggtatagattcaagagccagatgtctgggtttgaatcccactgctgtcaattattagtagtgtaacaaattatttaatttctttataccttcgttttcccatctgtaaaggaaagctagtaatggtagcctacctgatagggttgctgagcagattaaatgaagtagcttatttaaaatacttgaaatcatgcccaataggtagtaaatactctgtaaatgttagctgttattttaattattattattaacattagtaattcctttgcgtcttacttctgtgtacaatacagtcattttattttactcctcaaacctttttataatcccacatttcttatagaataaatggtcccaacttttatttttgaatgtttgacgtgtgccatgcactatgacaagcacgttgtctcctttaatcccaaaaacaatcataaaatgttggcagtactactaataccattttatagatgagaaaaaatgggatttaaagagctctttaaaattatctacaataataaagctagcagtggataatttgaagcataaaacctgttttgtaaaacttcagttctctaaccactgtgttacaatgcgtaacccctcttcttccttccacctgctcacccaatacccatgtctgctactttgtcagcctgctctcacccaacttcccaaaagtttacactgtttcccaagaatgctgagggacttgcagttccccatgtgcagtaagctcttccctgcccagtgactctgcatatgctgttctcaccatttctagtgccctttccactttgtaaattaggaaagtcgctacacgtcctataaaaattgcatcaactgtcccctctgctttgaggtcttctcttactttttaagtcaaagctagactgttttgtgtctgtgcgttcataccacccgcagcacatttgtccaatgttttttcctttctaaaatattgtcttccccactagactgtgagcccttcaaaaatagttaactcttacttttgattgttgcctcccaagccagaattggttttttaaaagtaaacagttcacaaaatcttaagataaactggtaaataaatagttcagattacttcctgaaggagcactgtccaatagaatgttctagggtgatgaaaatgttcagtatctgtactgcatggtagccactagccatgtgtgttaatgagctcttgaaatgtagttgatgccactgcagaactgggattttaattttatttaattttaagaaatttaaatttaaatagctactgtttaatatgctgggcagcacagttctagagtcaaagctggagcagcctttgattgaaggttcttcttgagtatttctcatccatatttccttctctgttatatagtgtaccttgtagttgtttgaagtcagagcattgcatatgctggagagcagagttcaagatgctgtaatgagacagcaatgatcttctattaggacaatggctcttcagaggggaaatttaggcttgtagtgtcactcacgtaaccacaacagtgatttatgtaatagggctagcagtcttctcaaagagcattttcaaattcgtaaaggatatttgcagccagaggaggatatctgtgttggggcgctttcaggttctctgcacagctaataagtggaaaacaacatcagcttctctttatctgtttccactgggcccctccagcattgtacgtatagatctgttttccatttgcattattatactgtcatttgtttatgttctgtcttctccccatcctaagtaacttctttgtgagccagactttttttttttttttttttggttatgcatctttatttccctaggacttaccatagcatttgacataaggaaaagcgtcaataaatgtttgatgaatagatagatgaacattgaatcaaggacaagccaacaattcctgggacctcaagaggcaaagcctccatcatagagtaatggatattccagagggatctgagcctgcagcactgttctcactagggagggaaacatgcaggaacagaatcctgtcctgttcacagcagaatcacaaagaaaagcaattatgcattctgggctagtccagacagctagattgggtagaggttcagtcaagttggcgtactatcttgcagtccacctgaggaagtttggatttaatgagtaggaagtgacaagatgcttttaacaaaagccttttttttccagaatccctgtgttggctggagggcttacccagcctccctaggttttgaaataaaatggaccagtaaatgcacaactcttcttttttgcataatctctgttagaaaagaaagggcccacggaaaaagtgcaaaagtgaggagaagaccccagcaatgactgccatgcagacacacatgcaaacagtgcacacatcctagtaggtagtagagcaaggtaaatgatttaatggaatatgaacagggtatcatctcagttcaatttagtgcgggtcaataaaaatttagtgagcatctactttatggggagaaacatgaatgattaagacacagtctcttcctttaaagaattcacaatctaacacagaagtaagactcatgagctaataacttgcaacagagtgtgatgaatgcgcaaacaaaggtgagttaggtacattggtggcacagaggagcagacagttaactgcactcgagtttgtcttgaatgatgtgtagaaattctttaactgcatggggatggggagaggttagggaaagaagggcccttctagttagaagcaataacatagtcaaaggcacaagtgggtgaagcagtgcagagcggccggtgtgggagatggggctggctcttcctttggtgactactgaggtgcccattttatcagaagttcactctgtctttctggagtttgcaagatgattcttgctattatatacaggatggactgacaaggataacctttaaatagggaggtcaactaggaagctgataaaagattcgggatgagaagtttatggtcccagctagaattatgcctgtgaaaataaaaagcaagactttaaaaagtgtgttctagagaagtaattgtcagctccctttgtgtctgataactcctgagaaagaaaacatgcgtctatcagtaagagtgatggtacgctacagaagtgtatctcaaaagggatatggggatatcatttggaaaatcaccttaaattattctgttgtcgagatcaccctctaataccctagcaaggagaacctctattctagaggaagaacaaaactctgtgggaaccaagaagtggaaggggttaaggctgaagatataaaaaataaatgttaccatttattgagaacctaaaatgagccatcatcgtggcagttataattttattttgtttttactactgtagggtaggtattctcctcattttatcaaagagagacctgaaattcagctagattctgaacatttttccagctccagttgctgctggtagaaatgcctggattcgatcacaggaccatctgattgaaaagcctgagctctttgtagcacagaccaccacctctctctaagacctttaatgctgtgacctgattggaccctaacattgtatcagaggggtgccattaatagggaaaatgaagttaccctcagggatgggctttaagagaaagatgcccagctagtactctgatcttttgtttctttttctccagtatcatcactatagtgtgtctcagagaatgataacagctcacatgctattttgctaaaagcgtgtgggagagaaattagtgagtaattcattcattttctttcaatcaacatgtatttatcaggctcatatatgccaggtattttgctcagtgtaaaggataaaaaggtacatttgcaagcattgctcctgcactccagaaatctgtagtttcatacatgctaaaatatgtagcatagaattctagtggagagtgctaagtggtcaagtagagatgtgtgcaaggtgtcatgagaaagtcttcacctcaccgccggtcaagtggcagctgcttcttaaagaatgagtaggaaatgtccctagggggagaagtgagaaaggcactccaggaggagcaagcagcagtgcaaaggcagggcatattggaagtgtttcaggagatgcgccatgtagcaagagctgaaaagaaggacagggctgttcagggctctgtgttctcttctgaggagcagacatctagtctcctgagtggagtgtgttagtagcagggaggagggatggagactgtaagggattggagggggtggcatgagcttagtgtttctgaacaaaatttggagagctggtggggaaggatttggttggagacagagtggttccaggagaggcagattccagcctgttacaaagtctcatctcagacaggctcaggacctagtctgagtccatcctaaacatcaccctcctccactaccccccaaacccattccactacctcagagggctaagtcattttaagggtcaagtgggaatggaggaggagcttcacctaacttactagcctgaggagtccaggatcagggctgtataccagcctataaaatgaatcagtgcctcagggtctttcccatagcaacaaaattagtccttgacacctagacagttcttgcttcctttgttttctgcttctcgtgttgcctgaaggcgtgcctcttcttttgacttgtataattccctcatctagctgggggcctcatataaactctgctgcactgctaatatttcagtgtcattttcagctctattacatgcttctctcaatcattctttagagcaggggatgtcatctagaggggtctgcagcttgcataaatgagttacaaatcctcgtaatttcaagtgggttaccaaacctcttcccagcagaaccaggcatctggtagctccaaagtgtgaaaaggacattatgcatatgtatgcagagccacatgccctacagcgattcagaagtacttgccacactttcactcacgagggccatatgcaaggagacctgagaactgctctttgaaaggaagctgctttagcatatcctttctgttctctattctctgcacaaggcttcaactttcttttcctgaacccatgaaaggagtgaggaaaaggtttgactgagtgtgcaaattatctctcatataaaactttgcatatatgtagttggctaactttaccatcagcagctactggagaaagtgaaaaagcaacaaagctcagtctatatgaacatagcgagggcaacaaaatcagggacctagatgactctgacatggataatgttgcctgaagaatttggaatggaggaaaaggttcgactgctggtagctgtttgacctggcttaagatacttatccccactgagacttcctgcacctgtaaatggggcataataatagctctactgagtagtgttttctgagaattagataaaataacagatttaaaatagcttataaaaacataccaaagaacaaaagctaacaaaaatacactttccatttccttccttttgatttataataatttattaataattactctgacttctaaaaataagtcaatctcatagtgacagagagtaaaggggtggctgccagggtctggagagtagggaaacggggagatgttggtcaaagggtacaaaccatcagttataagatgagtaagttctggagacctaatgtacggtatggtgactatcgttattaatcatgtgttgtatacccgaagtttcctaagggagtagatctcaagtgttctcaccaccaaaaaaaaaaaaaaaaatgaagtgacttgtgaggtgatagataatggatatgttaattagcttgattgtggtaataatttcacaatgtatgtccatgccaaaacatcacatcgtgtaccctagatatgtgtgctacttttatttgtcagtcatacctcaaaaaacaaaaacaaaaataaaaacaacaacaacaacaacaaaaacagaaaaaagcaaactgtaaatttaaaaacaaaaaactgtcctattcactttatgtagtttttgtggtggaaattaagtgaaaatagtgaatgttgtaggccgggccggggggtggctcatgcctgtaatcccaggactttgggaggtgaggcaggcaaattacctgaggtcaggagtttgagaccagcctggccaatggtgaaaccatgtctctactgaaaatacaaaaattagctgggcatggtgcatggtggcagatgcctgtaatcccagctacttgggaggctgaggcaggaaaatcgcttgagcctgggagaaggaggttgcagtgagctgagatcgtgccactgcactccagcctggctgacagagcaagactctatctcaaaaaaaaaaaaaaaaaaaccaaaacaacaacaacaacaacaaaaaaaacaaaaaaaacaaacaaaaatacttaataaagtgaacaattccaaacaaccagaatgtgtgattttcatcattattttggaggtacttaggctgtcgttgttacaaaaatatttggaaatgttgacttgaagtagatgtagtattgttactgaggagcagagaagttgatgcatttatctgtcaagcccagttcctacccaccttcttggtgcaaaaagctgccaaatacctcatatatgtataaggtgggtagtgtttggaaaggaggattgggaggtgccctttaaaagtggtatacacaaagtgcagacctgcagtttttacattccacaactgtgagttcttatcttttctgagacttaaagatttagcatgattgtcaaggcacattggatggataaccagccagaagctcagatgcttgcagatgctgctgtcagtttgcatcatcctttcgcagggggatggcgccctcaccccttctccctcctttctgcaccttggtggtggtggtggggtgggggtgttgggaatctccatgtgaaaggacgtggtgaagactggcagtctgaggttgggcctcagaaggagggcagtagataggactcttaaccaagttatcaaggacctgcggtttttcatttgcgctgtccaaatcccctttctcagtaaatttcagcgttttctcctcccatccttgtgacctggtgtggaagtggagagaggtggtgggtaagacaactaccttggcatgttctggcatcctcagacaggcctgggattgagccccgtctctgccagctacaacttgtagctgtttgacctggtttaagttatttatccccactgagacttactgcatctgtaaatggggcataataatgtatctactgagtagtgttttcaagacttagattaagtaatatattttaaatatcttatgaaaacatacacagaacaaaaactaacaaaaatatactttccactaccttctttttgatttataacaatttattaacaatgactctgacttccttctatatcacactatccttatctataaaaaagggtaaactaaataacttataatgcttgcacactagtaaaggctgaaaattcttccacttccagtgctataaccaagaaataaatgaggttgctatgtatattctaaggtatgtcgagataaaattgcacagagagattaaaaagggggaatctgatctaggtattattggacaagtaaagtgttaataagcaaataggtattgacacaatgaggaaagacacacagagcctgatgctgttaggtttaacgaaagcaatttggataaactgatttatgctaagataatagagattctcccagaactatgtttgtaatttagaagagggcagctcgaaggaagcatgagcctctgtcttggggagtaggtgcttctccctccattccaaagcacacaggcaggagtgcagcagagcttgcaggaggctatagttccccactggacactcatctgcatgagtgcaaggactccgtctgttttgttgccagttgtacttactgaatgttgaactttggataaatagattagtatcactgatgcacttcaagtattattgtctgagtgtggggtaaaatccaggacaagagaacctagtgatctttttagaatagcaattctcctggaacacttcctgaagacacctcagagcacttttgcaaatgctgatagtttatttaagcttgtagacagctttttcttgcctatcgtacagctgtgagtgtgggagcacaattctctgaggacctgggcatatgttctctcctggaggaaatgtgggagagagccccagggaacacattgtacccctctctctgccaagaaaagaaaatcctgcctgaaatgcaccctcagccaatgagaaagtatgagctggaaacagagctttagaaacttaactgtgtattagaatgaagagtgagttggtggatgagttggaaattctgggttccatttttgatcttccaccataatgatatctcccacatactacagaatatggtaaactctctggacttcagttcctcccccataaataaggagattagtccaaagacatgttaatgtcaagataccttccagcctgttgctctcaattttattggcacttcctagaattgtgaagctggaaaaatattcagatttttctaattcagcttttttatttcatagatgagaaaactgagttgtagagaggtgaagttatttgtcaaaagccaccaaaccaagtagaagccaagctaaggttaagaccagtatcctcagaccaccagtccaaaggctcttaatctgttgagtcatagtccaccttaaaaatctgatgcaagccctggacatgctgggagtggggaagggatgggaggagcaaatgcatcacaagtaaattcataaaatttgcaaactattttcggggttgtggggggggtggggaggcaggtcttagattttaggctaaaagctctatgcaacactttatttctgaaagtcggtgttagaaccaaatatttaagaaattttttttttaaacagggtctgactctgtcgtccaggctagagtgcttggctcactgcagcctcaacctcctgggctcaggtgatcctctgacctcagcctcctgagtagctgggaccacaggcatgtgccaccacgcccagctaattgtttttgtatttttttttttggtaaagaaggggtttctccatgttgcccaagctggtcttgaattcctgggctcaagggatccgcttgccttggacttccagttgctaggattacaggcaggagccactgcacctggctagaacgtttttatatgtgatgggaagtgtgcctctggcttctttggcttaatagcttcatttgtgcaagaagcatcaaaacacactggaacaaatctaggtttatatctgccctccaaataagtgttactcacatgttttattgatggcagtttctgatttgtaagaagccagttccccttttaaatgttatagctgttgttcctcttacaaatacttctgctaaattcggtgctcctcatttgtcgaccatagtcagataatacaaggggctggctaaacagaaaaggttttctcattaagtgaatctgaaggaggcctctactaattagttattgaattggatctttggggtaggtgcattaaaatgacctgttcttcttgaaaatatatagcatatagccctggaccccagcccagacctattgattcagaatctttaggaagtaaggccaaagaatctgtgttgttacaaactctccaaaacctcttatgcacactcacatttgaaaacacccattctcaatacttgcccaaatattttcagtctttaacaaaactgacctaatgataatactaccctaaatgattctttggtctttgaaatggtgaaataatgcaagattcagaccataatacaggtatggaaaacataccatttaattttttcaaagaaaatattttttctctccacttaaatacaaggagatgagtggctgtggcctgactcatgccatggtggacacggtgtagggtatcagcttttcttcttggtggtcctcattttccagatgattccttagctgagttttttgttttgttttgttttgttttgacagagtctcactctgttgcccaggctggagtgcagtggcacagtctcggctcactgcaacctcggtttcctgggttcaagcgattctcttgcctcagcctctgaagtagctgggactacaggcgcttgccaccacgcccggctaattttttgtatttttagcagagacggggtttcgctgtgttagccaggatggtctcgatctcctgacctcgtgatccgcctgcctcagcctcccaaagtgctgggattgagttcttgttttaatattcacagttgcatgcatgcctgccattgaagaactacccctatagttctgcttcattttattgaaatacagaaatatcaagtgtgttattccaaaaaaatactttagcagatggtaaatataaaacttatatctcctcttagcatcaaacaagctaacatacacactcatataccggtagaacaaaaacttatctaagaatgacaaagtctgacattttctaactttaaaacaccttgccctatttctgaaactaaggtttctctggttttcaaagaggcttcatagaactcctagggatattaattcagctgcttttcaccccctctgtcttcaggtttgggtttcttgagtgcttccatgggctcgcatttcttctgtgtctgtgtggccacttccgggttcagatccctctattccagtagcgtggtcagaacaagataaattcactccagccctcagagcctcatctcaaggtcaatagagggaatttggaaacttctcttgagtaagagtataggttatccttgtccactgtgacaagggactcagtgaaaaaagcagttgccctcaactacccaatgtgtggcccaatgtgtggcccacagccaaagtctgtgtgcacagactttgcagtcacgtaagcacatacttcattaaaattgggttggttacttttttcccccacagagaccatgtcctgattgcagtttattaaaactccctaggcagtgtaccattatttgtcctgcttgtattcatgaatagcctgtttgcaataggaacatccaggtagagatcaataatcagtctcatagttagggcagagagaggaaaaaaaaagaaaatccactggtgcgctgcattcagctgtgtttaagaggtcttatcattaaagcagcagcaggcatttataaaccaagcttgccggcagtgctgggcagacaggattagaataatcatccatcaggctctgtttcatgaatgttttcctttgacttttggcaggatctccaacctgagcatatgccagttgacatgggaacactgaggccagcaatttaaggatttcacatttgcttgcagtggtaagatttaaatatataacaacgaaggacagtaaatattactgggttctgcctttttccattagatgtgaaactgaagttgtttaggtatatcttttttgatcagtaaagatctctgctcgcaaaaccatagcaaacacaagagaaatccataatccataagtactgaacatagtgtttgttggtacgagtgaaaatagggaaactaataattagattttttaagtgtctgcatcattggactaagtggaggaaatggtttccattttgaacaatgaaactacgtgtattcagaagagatatgattatacagcacaaagagacacagagtttaagatcaatggggagaaagaaagggaaaatgactctgttttcaattctgcatggggcagtcatacccttaacatgggtccagatatttggtttctaaaacaaccacatttgcagttagttaggagattacgtaaaaatgaagactctctgaggccgatgacagtgcacctccacacactggacacttgctgctgtcagagacatctgtatgccattacttaaaaagagagtgataatggtgactgttgacagacggatggcaaattgtgttactggaagttcattttgaaaagggaagtctcccactcctctgtgtgtatgtgtatttacatatatgtgtggacaaacacacatatactccctcccttaaatctgaggccgaaatataatattgaaaaaagtaataattaaaatttacattcttaataaaagagagcaccatctctggaaacattttcaatataaagtagaaattgcaccatgatagggttaaacagtcaaacaagatcatctaggcctcggtggattctttgaaccccgttttgtttaataggttaaattaaaaacataatacccattccattaccatcttcctttaagccagatcatcatggagtgagactatatttggtacattcagttctctgagagctaccattttaatatattttctttctttccttctttcttttttttgagacagaggcttgctctgtcagccaggctggagtgcagaggcacaattacagctcactgcagccttgaactcctaggctcaaaggatccccccacctcagcctcctgagtagctaggactacaggcaaacaccactatgccttcctaattaaaaaaaaattatagagatagggtatcactgtgttgtccaagctggtcttgaactcctggcctcaagtgatcctcttgccttggtctcccaaagtgctgggattacaggggtgagccactgcattcggccactaatatagtttctatatatttcttagtccccattttcatgtggtcttatagcagatccatggtgcactgagcaaaatgtgactttgaacagcctgatttgctcattcttgtatactgaccatggccttacatctgtgaatttctgaaggatgtattttggaaattcagcattcatatttagtccttttagtatattcttctcaaattgccttgctgctttattcagtcatattattgcagtaacttttagtttaatagcttgtattttcaaaatctatttatggaacaatggaagaatgattgtaaaatagcttggaagatgcattacctaaactgatacctggaagtgatgatataacttcacacttttatgcatataaaagtaaatgaatgtatcattatggtttcttttatctgaatattacattccccttgaaaattaaataactttgcacttgagtttcatgttttatttcatgatttagaagtgctttctaggaactaccaccaaagcctaacttctatacataagtcgtggtttcctcatacatacatggaatttaagataacatcctaattagagtcattaaatcttagatgtcagaaggggctgagttaaactgaacagggcttttaaaaatccccaaggttgagcaatgtgaggaggaaaaaaaagtaagagaaacacgcatgtgattggccttaatgaaattataagcctccaaggaagtggcctacaactcacatctggaccacagaagtcatcatttcatctgaactgtatatatcaaattatgctttttgttatcaaaagtgaaagtctacaaaagaaatccagtagaccatgctaaattgacttgcatcatttagaaagtgggaagattttcttagaactagccttggagcctcttgtctctgtagagaactaaggaccatacagaatccttttccacttctgcatatgaggacactgttgaacagatagacttgtttgagaaataatataatcatgtagagtgacagagtagaaaagcactaatgtagacaccaatgtacctcaatcttaatcctaaaaccatacctgattttgctggataggatttttcttcttttgtctctaagattttaaatagtctcttaaatggcaggccttagtttttaatttgtaaaaggggtttaatatttactctattctctgtagacttagctggagataaaataataagtaaaaaatactttttgggacttcaaatcactacacagaatttagtattgctagaaagttgattccttattaatagcacttgtctgatttgaacattaggtcaaaaaagcatcttcatcgatctggtctgtgtttttacattgaatgaaggcttacagttgctctgagctctaatacacttgactgctcttattaaattatgataacaacaaaatgcaatcattataactttccctgaattgtgtgtgtatctatttttagtgttcttaatgcactgatccaaaatttcagtgctctaaaattactccaaatgagagtatgggaggttatagaggaaatgtttacaatacaatccctgtcagtaaggggagtagaaagggtctctgggactgatccttgtggtaaagccgtctttctcagacctccttttctctaattcttttcagatgcagacttcctaccacagcaaaccctgtgtatcttcctgccccttctcctcctctctacccgctcccgtctcctttctcctctccttcacacctcagaaagtcctttgattgtttacaatccaggttttttttagctattgacccacagccctccgcttccataaatcctgctttaagtgtttgatctgtaagacaaatatacccccatagccctgagtttactctctgactctgtttcattacaaatgttgtagacaatcaatatgagttgggggtggggggaaatgtcttaggtcaacaaacacaatttgctggaacataccataatctttgcccttgcaaagaactgttgatcacacatcctttaagaataaagccaagttgttggaaaatgtaacttaaataatacacaggaaattccaacaattacacatgacataaaaatctttcagagctcccagttcatgtactaatgttagaagcaatcaaggactatgaataatggatgaagttaaacatagtggcccaaattttcatccagagtgctagagaagaacgttaacataatggatgtgggtcaaagaaattgcctgacatatgaaataccaaccaagagtatcatccatttattttttatttaggagtaaagtttgcacaccatgccaaggtcaccattgtggagatacttacttgtgtgcactatggtcctccctaatgataacgatattcttccccagtcccaagacctccaatcacatggcagcatcatttgtaccttctgtgacaattaaaatccaccctcatttctaccaatttgttctcccaagagaacaaaagtaactaatagttccttcaagcctgggtatggtctgttttgtcctcatgttagaacttaatttaaaccttccttggtcacaaaattcggaaactaatctgggaaagtaaccaaagagaattaagatgagaataaggttaagtatgggaaatgttgtcctaaaatactccacccaaatttccatgtgtttataactgactcaattagcttgaaaattagtttgaaatcatcatagcagatcatactactaatagtcaaacagtgtactcacaatctggcgggtctggctacgtctattatttctagcatttccaactcaaaaggtaatttctctgttcaatcactgacctctgtttctccccgaagccagtgtggaggtaagatataatcagcaaagagagctccttaggacccttcccaggaagaggatcagaaaattatggaaattgacagagattctagtagggtctctaaaatctcagctatttttattagcgttttgtgaagcttcagaaaactgcaagtattttctattctagtcaccccctattactttgcagctgatcaaaatagcccatgactaacaataggaacccgagaaccgccataactgcaatggtcccatctatcactcagacatttttggtgtaataaagtcaaaagcaaattttcttcttttattttcaagttttgcatctgacaaaatgtcgttagagctcagtgacttatgaaaaattgggacagattgagagcctctgataaaggcaatcttttttatcactaaaggattctgctaaattgaggggaaaggggagttatagttcttaataatgtgttttatcaaccacctgcaaaaatttttaattaaatatctaaagatacattatacgatattgttgtaaaaggcacaaacatgattccagaaacattttaaaagcttgaatatttaatatttatttgttttagagatagagggaaaggggagatgagaaacgtaaattgtgtaatcatattatgatttcatcctcatatcaggcaagaagatatgctctgacataccatcccatggttatgtactttaccttttagactctatctgcttatactgtgtgtgtgtatatgtgtgtgtgtgtgtgtgtgtgtgtgtgtcagagagagagagagagaatatcaatgtctgagaaagtagagttatcaaaagtaaaactttcagaggttgcctgaaggggcaagatttaccaaatatctattgtttaaggagtgacaattactgcgattaaaaatagtaattttagaattgttcaggatttgtattaattcttaatgttgttttggtgtgtttttcaatgagctgtagtgccatattgtcatggcactaccatgacaactgttgtatccttggatcccctgaaatcttggtttcataaatggaggatatcatggtaaaaatagacatctctaaatattaattttccatgtgaaagacattaatcactttttgttttttcttttcctaatcactcatgcatccatttttttttttgcaattcattcattgaacaaattatcgatcaccatgtaggtattgctagacagtgttttgtgtattggggatactgaagtaaacccaacagataaaaatgtctgcattcaaggaagttaattttcaatggaggagataaacgatgcatggataaatatatctaaaatatagcatttatatattttatatgcccatatatattttatatatagatgtgtgcaaaaagaaaaaagaggagatatgaaatggtatatggggctgaactttacatggagtggcctggtaaagcttttctatgtagataccttctgagaaaaagacttgaaggaagtgagacagcaagccaggcagaaatctgaggaagattgttctaggcagagagaacagtaagtgcaaaagctctgagacaagagaatgggtagtatacttgaaaattagcagggaggctattcagtctgaatcattacaaggatcactctggctgccatgccgagagtgtcttagtctgttcatgctgctatactgggtggcttataaacaacagaaatttatttctcacagttctggaggctaagaagtccaagatcaaggcatcagcaaattcagtgtctggtgagggcccattttcttgttcataggccgagccttctgtttgtccttacatggtgagagaggcggtaaagctctctgggatttttaaaattgcaataatctcatttttgagggctataccctcataacctaattacctcccaaacaccccacctcttgataccatcacctaaagggttaggatttcaacataaggattttggcggaacatgaacattcagagcagagtaggaagaaactcagggtgggtagggaaggcataagtaggtagaccacttaggagactgcttcaattacttcagcaagagaggatagggtcctgtgcctaggtggagaaggtgaccttgactaagagcacaaagaacttgtctgtaagaacaggaaaggtgtggataggtgggaagagatggtagtcacaggatatgaaagttctcttttgattgtttaccaaatgtcagtcacattagactgcgtaagtgcaagcatacagtgatcatctgattgagtttaaggagggttatgattccaccaggaaagttcaccaagataaaaaggagctgggaaaatattacaatgatcctctatggaatttaagctggaaaggagagaagagggaagagaggatttcatgagagagctatgtctcagagacacagagagtgaatttcaggtccttgtgggattttagaattgtaggagttagggtgttagaaggagtgatcaggaaaaataagagatcatgatcatagaagagaatatttaaaattgagatttttgcaaggagtgcagttattgatcaccacaaagtcaagtgtttgactgtggaagtgagtggctcaagaaggatggctgatgaaatctctaaaagcaaagtagtccagaaactgagaaacaggatattggaaggatcatgccattggatatgaaaatggccaaaaattaaataaggatagtattagagaaagtgataatgagccatatgctaaaatctccaatgaatggagggagaatgaactggaggatggtggaggaagcaccaacaagagaaggggagtatagcctgatgccatgaaagagaaagctggagttttattgaggaagaaggacaaaaggcctggacacagtaatgaagaacatggaggacacctactatacttttatgctccttggtaagagggatctaggagagtaaaagctatctcttgaaagggctttagtggaatgggcgttatctggaaagtcagatttcaactagtgcaaaaaggtgaaagagaagtttccataggaagtagagaataaacagatttactgatgattgacctcaagtcccagaggattcagtgaaagactttcaggaagtatgaggccaagatcagaacaagtagtgaacaaagccacatgaggattagagaagaggagataaaagatgacctggaagtgctgggctgatgtggtgactgatctgccatggtgcaataatagctggtctgctggtccagggcaggtggtggtggtgaggctatgagcattgagagggaagagagttatatgcaagttttgggggtgagacggacctttccaagaacatgaagagctgtcaggtggtgattgactgttgctgaggagactgttatccttcagaagggtgatgtgctcagaacacacagataccctcttaagttgagccaaacagtggccttcagcttggtggtcttacactgaatgggctggttccctctgagttcatcattacagagcccaatagctcaattttaatcagaggatacctttgccttccttcaacagtagaacattgtattattgggcttgtcatatacagactaactgtgaaactgattttcgtcatttaaagcattcttttgtgatctttgctgtttctcccctcaacctatttataaacctttcttccccctcccctaattttctctcctaacctattctactccttgatgctgtgaatgaatgaataaatgtatgtccattgcctccaatgtctctggaaatactgccttctccccctctgtgcatgctagttgccccatagttttgcccatcttctattttgtgcattctgagctgtgtgaaggtatgtgcattgcaagtcctagtggccctctccattgtttgtcctgatattctgcctttgctgaacagatgtgagaactgttgttgagtcataagtgactgttaacttttcctctttttatctaaaacaattctaaaaccaacatctttttgggaaggatgataatattcatatagtttttggaggcactacctatgatcagtcattctatgggactataataaaatgcaagttgtaatgaaatctaaggcctcaggcccactgtctccaaaaagtaattttctgtttgtgaccttaggggcagctattcagttctctagaacaaaaaaatgtacatatgaagtagataagaatagaattacgatcacaattagtgacatagaccatcagtaccattggggttatcatgaagcataaaattgctatttctcttcttatcttacaatgtagagatattgcaaggattttaaagtctaatatgtttggactttttattgaaagtagatgatacgagtcagtgaagaacacatgatttaggtaaatgaacttttcttaacagttaaaattattcacttttcatcctcacctgtaccattggttatttctttattgacattccaagacaagattcagtccccttgttatactcctcattctcccttaggttctcaatctcaggttctcaccacctgcagtttctgaggcagtgccatatagagtaagagcattggatatgacaagaaaggactgggactggtgtctggctttgctacttaccagctatacaatgctgaagacatcagtgaagtgctattatcctctattttcttatcacagggttgctatgtttaactaccctcatgtatttgaaagtgctcagcacttatgaagagtagttcctaaataaatatgcactaataatttatgtttatcatctactccttggttttggcttcaggtgatagattaattttaatgctttgtttttgatgcttcctgtttctctggcatctgcaactgttcattccagttttctgcttaaggatttttttgcctttactttccacttgactgatgagtgtgtaccatatgagattagatttgtggttgggatggggaggtattaggagactctcttttagataaggggggatcagaagtaaaggtgccaatgacatgtatgacaaaaactaaatatttatgaggttgaagggaaagatgagatgatgggaacctgagtgtcagttgatggtaagaagttatcataaagttaacctctagcaatgtccatagtgtgtaggactacaaacagtaaaataacatttgactgtcttttctagaatctataaataatcaatttaataaaataaaattctattgtctccacgtaattatagatatgtaacttcatagtgtgtaattttgatttcttcacacatcttccttagcacacagagcacagaatgtttaagaactaggaagaccgaaactattcagcaagaactaagaaccacaatgttaagggggtccattgtttatttttttttctttagaggatgaaaaccaaaggtcaggtgatttaatttaaaattaacactcttattttttgcccgcccgcctgcctgccttccttccttccttccttccttccttccttccttccttccttccttccttccattttcttataactgcatattgttggagtctttagtcaggtatcattgaattaaaaaccaaacctagtaatcatcatctttaagtgatgaagtatgtacaatgaaactccaaacagtagagacagttaaaacagataagtttccaagctcagtttcttgattgatactaccttttcaaaacagttgggtattccatgtcatttaaatggcaaaaagaaaaagagaatatattctgcctgactgtgtctctttggtcatcttttcacactccattagaggctttatccaacttttgtattcagacttcattgtatttttctggtgctagaagaaacttcaatgaggacatgatgaatgtccatattaaattagattcccctcccctttcaattaagttcatttaaatttaattttgtaatcttacttcagtaaaccatttgactccagatgttggatgtactttttcttatttctgcttccacataatcatacctgtaaaagatttatcactgcaagaggcattttggaacctttcagagcatttttggcatatgtttcacggatgactggttaacatgagcaattaacatcctaaaatgttcttatgctctccagaatatttttaatgggatgttatttttattagcctgaactttaaacaaataatcatcttaaaggaaacattatcatcaaaacaactcagttgcaacagaaacccaaccctaaaggaaattggtaagagtgaggagaaaaaaagacctttgggctaaaacaacctttaacaaagatatataactgaaaggcaaggcttggccttttgctaaaataagagttataagcagagttcctgtttcttccgaatgactctgagtcacttctctgtgtgctgtaatgcatatattataaagtgatgggccacacctcttatgcttagggaacatttaactctggcttttggtgatagaacattcagatcaatcagaacaacccaagcactacctgctttgcacaccaaaaatagagactcacacaagtgtatttgagaaactatagctgccttggagcctagaattcagacttactccattgataaatgatcttcaccatcagcccctatcaggcattcttagccacataaaagattgctagtaaatagcctttcttgttcttagaattatttgaatgcttacagttgttctgaatctgccttcttgctttcttaagtcaaagcttatttaataacatacttgatagccctcctgggaccttgtctaatgaaactcctagttctcatcaaagaaacatagactacaattcaacctttagatgacatactaaagaaaaacagcaactacaaatacataggataaagaaatcattttttttttcctcaagtgaaaaattgtacttcatgttttggatatacaataatgtgtcttgatgtacatgaaatattcaccactacagtaaacaagttagagtatggatttttcctcatacttaagggacccagtaagcaagctctaattttattcttttacagtcttgttttgcagggacaggtatgtgtctgtgccttggtggtggggtttgtctaaaacccaccagagtttagcatttactgtttccaagtgcttttcttgctcaaagtactaaataatactaaaatcatttaaagatgacagttaccattgcaaccaggcataatttgtttgtccataattgacagacaaagaactcacgttttctgcttatatctaatataacaaaagctcagagaatgattctgtgagtcatggaattttgcaactttattaaattttaaataggaaatcagtgaaggcctagagatgaaaaatatctgaagcagcaaatggcatgtatagaattaataaattgtcatgctactcagtgtatttgtttagagagtagctatgctaactaggaaagtgcactcgaaacatcctctgattagaagactacctagtgactatttgccaatacctctaattcctgctggtaatcgaaaatagatgtctaacatggaaatttaaagagaaggattgagaatatatacagagccgtaagatattgcatacatttcatgaaataagaaaaaaaaaagaaaattagttttgaaaagaaaaaattaattgtgctttcaattgcttctatagatcagttatgatgaaataaaacagattttaatgaaataaacattttgtctaccataagtgtcagtcaaattagagcctatcggtttgtaataacttggaaagtaagttcagaataaatatctgagacattgtctctatcctagagttattttttaatgtatttattcatccattcatcccccaacaatgtaatgaatatccttggtgcaaagcaagtggtagagcgtcagaaatctgaaaataaaaatcagagctaggtcctactgatgtaggtagaataagtttgaataagatatatgaattgtgggggcaaagggaatttttcccttccacttctgaaggttcaagtcttctgagataaactgacaatagattaacaggagcaaaagcatacaaattgattaatgtgaacgtgtgcatgggagtcatacaaaatatgagactcaaaagggccagttggttgaggcttacatagcctcttaatctgggagagggaggtgggagatgcaggcaattttgaagggtagtaaatgatttttaggggagtcaaatgagccccaaaagcagaaaatggtctgggacaaggttcctctgagctctggaggtgatggcaaccagttttggaaaggtgaggggtgaaactgcactgtgaacttgtcttattatgcagataaagttttccaggccatctcccggagcttccctcagaggaatcattgaaaagtctgtcatattgtggtgatgacttttagtcttttctcttctctggtgggtaatccttccctggttatttagtgaaattcttaatgaggaagtttcaagacaattacattattttgggggaggaaaaagtttcctcagcgagataggggagcttttcgagtgatcccctatctgcagttggtgagtgagaagagaaacctgagacagaaagtccctgattctgaggctgcctctaagaccttttaattaattatttatttttatttatttttagttctaagtgctcagcaagccaaagcaccatactttggggtattgctttctgacccccaacagaatcctatgtttgatccatgttggcctacaaggctaatgggctaatcaaggacaccctcaaaaggaacattaattccttgtactgtgctttagcttttttaccccttggaataatactgctgtggttttatatgccacaccttcttcttaaatgcaactgaaatttgtttcactgtgcctaaatggtatttaagatactttcttttttttttttttttgagacagagtttcactctgttacccgggctggagtgcggtggcatgatatcagctcactgcaacctccgcctcccaggttcaagcgaggtaaagcgaggtaaaggtaccttttcctccattttcaaattttcacagaatctggggacacttttaggactggaaacaaatttattctcttccatttatgatctaaagtctcccttctaattttccagcctaataaacacctgttctaattacttttaatcattttctgctggagattttgtgtgtgtattggctataggcaggtgttttgtaataattaggggaaatagcctgtaagacactccttagttatgctctatatactaataaatgctactttttctatttgtctcatgtcttgaaagccttttgtgtgaatttttgataggtttccaaattctacaaaaatatacacatggattttgtattacttaggatcttagtgcaagagtttttttaatttatgtttttagagatgagatctcactatgttgcccaggctacctttgaatgcctaggttcaagcgatactcttgccttagcttcatgtggctggtactacaggcatgtaccaccatgcatggctttggtgctagagttttgttattttgttctgttttatttgatattgttgtctaatgggtcctcgttttatcacaagaacctgcagagcttctgatgcagagcaaaacagaatagttttgatcatcagtaccctgcaggcaagtattaggattaattgaatcacctgtcttctagtccgacattgtggggtacgtgaggatgcggtctttatatagggaaggatagggccttagaaccattgctagtaaaatcttttgtcccaagagctgctagtttaaaagcacaggaatacagaaggaaagatttgaagatagattttggtcttttatttacattttcattatcatataatagcacatccctgatgcgtactccctacagggtatagaaactcaaactctttctctcacacacatacatatataataccaaatatttttcccccaagtaaagcccaatgctagaaaggactagttttgaatatgttttataatatcctaagggctgctgtgaatttttattcttgttacaattgtggtaatgaactgtataaattacacagtttttgtctgccagatgcaagtcataaatctgaagagaatattttctgttaaaaagacataatgatcattttactgatagagtttaaatggtagaaatcacatgcttctttatatgggttaaactattgtaaaaaggaatgaataagtcaggtaccaaatgcaatttcaaacaccagtagggtgttataagacgtatttgcattttcttttgtgattgtattgaagtaaggttcatttacagtgatagcatcatttaatttcatttaaagacatgacattgcaagtatccataatatgaacaactttaatggggagaaaggaggcactgatggagatcagcattgcccatcctgtgtgttctaggacacaaactgcagaaggtgttgatcaatagagtgatcccttggtcacataagtttgagaaacactgcacacaaacctgctgtatagtgcatactccacagccactaggtctgggagatgctatgcactcatgtacagtcacagcatgcaaccatgcacagcagcaggttaaatgcgctgagaaatattacattttaacatgttttagcttattacactccttttcattctgtcacattttataacagcccatggaattatgattcagtggaaaattctttggaaaatcttgatctcagaaatactatcttttatatcttaaatgaatttatttcaaaaaagaaatgtacacttgggaaaggtcactgggtgtgacattacaaatatttgctaaatatgtgaccttggggataccatttaaacttgctgtgaagtggaaataatgttatcttctctaactcacagtgagtcattgaatccaaagtctaaaagagatagtgcttttataagccttttgtaatccatgaagcactctcatttgtggtatttatccttatcgttattgttattaactttaagagttctgccccagaagtagtgaagaaattcttatttatcctattggaacccttcttgatttcctaaactcccttaccaaagttctcttactctctctttctctgaggagcctgagaaattgtatattcttcttagggaaaagataaatagaatggggtatacgaaacaagataatctaataaatttctttcagacaaattactttgaaatagctcaccagaaaatgtgcaagatttaggtgtttcatcatgttatgcaagagatctatgcttaaaaaatgtaaaaaaagagagaagaagctgaacattattaataacaacaatatatagataaatttaggtgtaaaatggtccatctacctgctcatattgcaatagaggcaaagataaataaatcaaccactgagaatttatttagcacatattatatacccagcaccacgacatataaagagaaaagaataatgagtttatgttgatcaaaggttttacaagcccattgtagggctaatatgaacacgtagtgtaaatatacatcaatcaactccagctttgcagaagaccagagtatttttaattataaccatgtactgcagttccaagaacaaaagaagttctaaggatggagaggtaaaaaagtatttaggcgcagatctacccttaaaagtgggtaaaatggggcaaggtgcagtgggtcacacctgtaatcccagcactttaggatttaggaggccaaggtaggtggattgcttgaggtcaagagttcaagaccaacatggccaacaggaggaagccctgtctctactgaaaataaaaaagatacctggccatgatggtgccggcctggaatctcagctactcaggtggctgaggcacaagagtcacttgaacctgggaggtggaggttgcagtgagctgagattgcaccactgcactccagcctgggtaagactctgtcaaggaaaaaaaaaagtgggtaagatgggtttcttatgatttttgtctccctggcaattggtatttacgtaccttgtgtattgtcaatactcaggtactcaatacaaatgtgttatgtaattggataaatagaaaagaaaagaagtggaaagaaggaagggaagaggaggaagagagggagggaggaaagaagcaaggaagggccgaaagaaggagggaggaaagaagaaagggagggagggaggaaggaatgaaggaaggaaggaaggaaaaggacaggaggaaaggaaattccagtaaaatagggcatcccactaagaccacagcaagtactagtgagtgtaaggcttcctgagaagagaggtgtgtgagttgcctgcccaacacccagatgcaggtacctagagggaataacgataccatgcagagagcaccagagttatcattagaagttataggctggccaactcctggctctgctgcttactacctgtgtgacctcagataagttgcttaaattttccgagtcctcttatacaatgaggtgctttctttttagcattcttgtaagaattaaaaaaggtttgggaagttagtaaaatgttaggcagctgtgagataacattgttattacatatggaaatgagatgaagctccaagaggtcatgaagtaaggaatctagccattctttcaaaaatctggagtaaattgctaagagggattttatctgacttaggtttgcaatatctttgagcgtattgtgttatcaccctattgcatatttggtggtaaggcaacagaacaccaacaaaattatgcattgaccataagcacttggctctccagccaccaactgcctgggaaggaatgcagtggggcagatggtatttttctgaatcaactattattatatagtgtggttaaggccactgtgctctgtcctgtcaaagtccactgatgattaaaatggttcaagagtatttaaagataatatatatattttttaaaaaatgtctgttcttgtctgtgggagttttgaagttttcagagtttttgtgatcaacttagttgaccttcttcaatgactagaaaattacagtttggggacctcagtagcaactgagtggccacctgtgaaaagtttctcttaccttcttgcacctttaaatgatgtaacacagaccaagcatcttatatgttggtttggagttcatccactataaggcaccaatacaactacatctgaaagtaagaggctcttcctatgtgctttccaacctgattcagcagtgattcccttgagtactcagaggtaccagaactttctcagagtgagggaaaataataaaaatgcagtatgccagccactcttggactttagcattaattccttacacatccttctttttttcccacttcacatcattcccccaaaaatctcctccttagtagggaaaaccattttccctgctgtagagaaaaaaagagaattcctttttgttagcataggaatctaccacaaaggaggagggaaacactcctgtttttccttggggaccatttttatttgcatggttgctgcaaactctgtccctttcttgatgtgggtttgccttttgtctgtgatcatccagggagtttttttttccttctttggcatcttatcagactgggggcaggtctgggaaaaataattgtgcttcctcaaaaataaaatatatattttttactcaggtagatgaaagggcagaaacataggcacagagacaggctaatgtgggctgggtctcctgggtggcaagtcacattgttcagtgtctgcacctggaaatactaagacagaccagacagacaggaagaaaacttgaaaagtgaccaaaacgaaagagcatatgtttcctttcaatgttataacttgccaccctgcccccatttctactccattcccccacaggcccaaggtaatgtctcaaagtccaggcgtcatctcatggagaaactaccaagaccaagtcaaatgctaccacccctcctcactctttaccatccctctaccatttcagcggtgtagcctcttagttgaggtgggatggaggtgatgaattgcaggagcaaggcttctcatctgggaagcccaggtaagcccagcaaaactcagatggtcatgagccctagccacggagttcttttgtgaggcaagtcatagcagccagtcccctggatcatagatggtggccatttctatagctatcaataaaactcacaaactctagataaattacactctcttgttgattcaaataagatttttttctcatttagattgaaataaatttttacttttgtttttcaaagaacagacatgaaaactattgggctcatggtctcatttttgaggatggatggctatttgtatgcaaggtatataataatgtgagtcttaagatttctctttgtaatatttgatttaagggacttttatcatacaattgaatatcatttttattttgtttattaaattaaataataaaccaaataaaatatgtttagaaacatgcccttcaaattaacacctcaaagcacaatttgagcataacactgtagtttaaacagttcccttcccatttcaaacattacctggagactaaatagcttcaaacccaaatctttacccctttttctgtatcctcattatgaacataattttctctctgtaactcttcccactattcaacaaacctacatcctcccgcagtgattccagatttttcactaaccacaccttcttggtagacatagatggagttgtgggctggagatagggttgactggcagaactgccactatggacagcaggaacactgtttggtcattggcccttgaggtctagcatgtgcatatgagtgaatcaggctggtcccaattccaaggccacccacaaaaatgcttcctgtgtgatctgttttgaatgccttctcttgattcacatgcacgaaagaaatgcacagtttagacttcagatacagtacagttgaaaatgctcgtgacatcatgccttatgtgactaaaagatatcttagtgtttctgttgaaacaaagataataattataaataagcctcttatttatttcataagtgtcttctgtgtatgcacaagcctttgcattcattgagacaacctggaaatgtgatagatgtatcaatggtttctttttattcttctaaatatccacccccaaccacccgcaatgttacatggctgggctggggtgatgttccagggcatcaagcaatgtgtgaggcactgagatctaaaaagatattttcttttttaagaggagagctatgtgttcacaaaatcattagtgaaccctaaaagagccaagagcaacttcagacctgttaatactcacactgaaaataaatggcaggtcagacaatgtccatgccataaaactatgtagatatgattcttatgtcttctgtctttgtaacatagagataagaagagagagtaggagcaaaaagtgctttcctgaataaacatgatttataaatatggttcgatagaaacacatgaaaagtaaattttgttgagactggtgaaattttagaaggggaaacaattttcttattaaaacctaattgttctctgattctttctctccttctcttcaccctgtttctctttttctttccataaacacacacatttatttctatatatatatatacacacacacaaacatacatatgcatatatacatacacatatgtgttatgtgtatatacatatacgcatatgtatatacatatacagctatatgcatatgtatatacatatacacacacaattagtaagtactcagcccaaaaaagaaaaaaaatggcaaagtgacttgacttggtctgagaagaaacagaacaggcaactgagctgaaaagaccatgtgaccacacttgagatgaaaaagcaactctataattaaccactcctaattatgatctgagcatcacttaggagaaccactgtgtggaaaaactaaaagtgcaaatgattaaatgtatgtcatttttgctttggtgagaagtgtgcatttttaagatgtaaaaattatttttcaaactaaaataaactacactgtcagtaattcatcaaaaacttaatgagcttttttcttcttaaagattgggtaaaatgattttattacttgtgaaggaatccttcccatatttataggttactcaaaaattttgactaattccacaaaaatttcctgaggctttgtggcagacagtgtgctaagtgctgataaatagtggtatattcctccttataagctgtctatagactataagctatatttaccaattttgataaatgctattggttctttctagacattgtcactttcttcttaattatgttgttaatttctgttgctgagctctttccatagacaacgcaaacataaacttgaattgggctcttcaattatttgttactggaatactaataaaaggttgtacatttattgatctagaggcattatcgccaagtatttatatatttatatatttatatattagacatatatccaagtatgccattataaaatgtgtcttctaaacaacagatgcagaataacagcaataaaaaccacagtagagacttcaatgacttttcattaaccagtcaacctctccagctaaactatgattttgcttcaaaagaatagcaggttttagatttcaataaaaattgaccccttgtagagatgtttatgtgactattacatttaatttattttttgctttattttatcagaatctttttctgccaaacattgcaattcaatgttttatagatcacacattctgagaccgagttttagttgaggttagtgattaatttgaaaaataaactcactgaagttgcagagtatgggagatacctgatttatagatatagaaaaacaccaccaaaactttggaattcctggataactcttagtctctttccaaagcacaatggggtaaacagaaaatatggcttaaatgtcacattcggttcaattataagatgtggaagagattaagataaagaaataatcagtaatagaagcatcatcttctaaccagagattccttatgcatttgaaaatataaactatgagatggactttcagtaactacatctacatactgaatattaaggttttcagcaagaagtaagttttcatcatctgaataaattccaaaagttggctaaaatcataagtggtggtgttgaggtggcagagaaaaaatgagaaggccacaatgacaaccatctaagtaagagatgttgaggcctccactgaaagagagtcagtgttattagaaagtgagaaacagtgtgcagtagcattggacagagtgaatcgatttggaggctgagggagaaagggaagaacaaggtaactgtgtggttcaagcctggtgataaatactgaaaaaacggacagaaatgagcaggaaggaagcagtttggaaagaggggtttaatcctgttgaaatgggtgcattctgggtcatgcagattggaatattcagtaggttgatggtgatacagaattgaagcggagggaggaggatcctggctctaaagaagtgagctatctgagtcaaagcagatattttttttcttcttccaccctccattctctcttttcttgctacatgctatcctgacagttttctgctgttttccttattttggaagcttccatgatcagtgatatataaacataacttttttttccttctctgtcttcagaaacagactataggcaagtgatacactatttgatggaagctactttgtgagtcaagtctgtatttgatccaattttgtatcctacacagcacataaataatgtctagtacatagaattcattctacaaatggataatgtgtggtcccacatggcatagctccttctgaatcatatgtgaggacccattgactaacccataatcaatccaggaatgagacttagtgcacaagaggaatatgtgtgtttatatcagtgcgttctttgtaagaaatatgccagatgggaagaaaatggggccgtcctttgaccttgaagagggactaaacacagctggtcatcagaaacaacacacactcacatacacacacatagaccacagttctttgacagctttctcttgatcccaaaggaagataataaatgttaaaaataaatcactgaattgtaaattcttaaaaaatggccagattttaaacttaaccatgttggaaacatcacattggattcgaatttcagtttctttttatactatattttaacttattcttcatagattttgcagttaacagtaggtggtggggaagctgggcttttcttgaaagaacttacttgaaaacaccatttttttgaatggagaaggaaatattctaaacaacagtctagaattcctgtgaggttgctattgtaaaagcagcctggtttgtgaatcatcaatccctatctttgattctgttattttccaaattgttagtaaaatagagtaggttctcactctactctgtcaccatcttctgtagcaaaatttggcttcctagaatggtggaaactctgtttttcctccttatgccctgtaatatacactctcaaaggccctgataagaaacactgacttgcacatggcaagtctaatgacatgtggctccctacccagttgagccacgttcaccattttctgagctaagggaagtctgtggctgctgtgtgctggccccttgaaatgctccagctcagtgtggccaattctgctctggctcttgagagatgcaagatgcatactgtattctttctgggtagaggcactactgactgagttaagtttacccttttccctttcattgagagcttagacattttttaaaaaactgtttttcattgatttctttatatactttaaagaaaaatcatgttttgggccactaagaccctatagtcatattattgtgtttcagtttccttaaaaataaacaaaaagatagcatagaaaggacaagtgcttgtcaaatattccttgtatttccccatactttgtggtttagtaggggcgatatggtttgctttggactatgggctgtgaagggaagtgtcactttcaggctaaagcagtaagaaatccacacttaatgaaccagtctctcatcttctgagggggttgagtgtttcagcactttggtcttttgaatgactctatggaggaaagccctccaccatattagatatgtagcacaaattaaaaatttgactttgggccgattgcggtggctcatgcctgtaattccaaaactttgggaggccgaggcaggtggatcacctgaggtcaggagttccagaccagactggccaacgtggtgaaactccgtctctactaaaaatacaaaaattagctgggtgtggtggcaggcgcctgtaatcccagctatttgggaggctaaggcaggaccatcgcttcaacccaggaagcggaggttgcaatgagctgagattatgccattgcaccccagcctaggcaacaaaagtgaaagtctgtctcacaaaaaaaaaaaagaaaaaagactttggctgtattaatgtgctgagatttggggttgttaccatgtcattgttagcctgacctgactaatacaaatagtatttgtgatgctctaatgacactaaattactaatatatgtatatatatattttatatatttatctcaagtagaagtttaatgttcttaattttatgatgcagaaaaaatgctatgtaaaaatgattacttggtgccaacattaaagatggatattttaggctgggcatagtgactcatgcctgtaatccaagcactttgggaagtcaaggccaaaggatcccttgaggccaggagtttgaaaacagcctgggcagtcctatctctattaaaaaaaaaaatatatatatatatatatagctggaagtggtggtgcatgcctatagtcctagctactcaagaggctgaggtggggggatcacttaaacccagaaggttgaggttgcagtgagctgcaattgtgccactgcactccagcctgggtgacaaagcaagattctgtttcagaaaaaaaaaaataaaagaagaaaggaaggaggcagggaaaggaagagaagggaaggggaggggaggggagggaaagaaaagaaagaaagagagaagggagggtagggaggggaggggatgggaaggggaggggaggggagatagaagagaggatggtttggttgtctgtctctcactgacactaaaaagaagtttccattcctcaccatgaaaaagaagtttccaatggttcctttagtcaaatatctccttagccaattgctgtcttgtgcctaatccaaattgtattatgtgcccattcagattatcaaaaggaacatctagccttcttataggcttggaaagttcacagtgatctttagggcaagggtcatgtcttatgatgtttttactcccatcactaagaaaacctgtgattttcagtaggcagtaataaagtttactgttaaatgaatgaatgtatcaaaattattagtcatctacaagcatgtcagaaaagtttttgaatactcagttcctgctggactgaaaataaattgtgtaaattttcctcagaacacttgcctacataatattaatccttttccttcatcccaaatcattccccacccacaacagtctgaaattagcaaaggaattaagcagtatctggttagttaaactgtgaaaagaagtgtctctcaccttagataccaacctcctggactggcccttaatcactgtcattttctctgactaaaggagaacctccttcaggagacctgtgcagcattgatttgtctgagtcatagcctggtgcaggtgattcagctaatttgctataattacaaattttcttttcctagaggtaacactcaataaaaaccttgggctctctctctcatgtttgtcttgaaagcaccaaaaataaccccttaaaattattttattcatgagcctgttatagaaattttctttcttatttggtaccttgctgcgacttaagtttctggcaaaatctgggatgaattgatgtgtgtggtggagggagttataaaggtagtgtcattcttgggacttccaatttataactgctaccagatttggttgtgtgactgaattgttggacttcacatgttctaaagtgaatttccgatatttcccacaaaggttattcagcttgtagtattcatcatcttaactgctcacacccaaacttcttggagttatccttgacacctctcttctttcacatctcacatctcatctatcagaaaatcctattgactccatattcagaatatatactgaaacctcccacttctcatggcttccattgcaccactctggtacaggctaccatcatctcttgattgtaatagcctcctaagtcatcgctcttctttgtctcatgatctcctagaacccatctcaacacagcagccacagtgatcttttaaactatagatcagatattactacttctctactgaaaatccccatgatagagtttcaccttgcacacagtaaaagccaacatccgtgtaacagcccactttatcctatgagatttgactctttgttacccatctcttctcctcccctaaaatctcccaccccctattcactatgctacagatcattagtttccttcttgttcctgaaacccaccttacatggcttctgccccaggatcttggcagttgctgtccttctggttatgttctttccacagatggctagctccctcatctcctataggtttgctcagatatcaccctaatgggcctgccatgatcttttgcacctgccccttccctgggtatgcttatttctgcttgttcaggtaattttctccttcattttatttattatttgtttttccttctagaatttaaactccatgcgggagagaggtttttgatttggctcacgattgtatcccaaatgtctggaacagaatctgtcgcacaacagatgcacaatcaatatttagtgaacaaatgaattttatacggcgcaatctcccagcaaataccttgcagctggtaaacagttggtatggtgggatgacatttgagggaagagcagaaggagaaagaatgaagacatttgagttcaccagctaaaagaaataacctgaaaagtcatctgggaaccatagcttttgtgaatttttaatttctgatttttgtgcaatgaagtaagaagggaatccccttgtattcttcacatattataattagagcatgttgccaattaatgtgagcatatacccagaaatttatttcattagcaatgttttatttttgtaaccaaacaatagctatgtgccaataagtgagtagtttgtgtacatatttaacaaagtttgtgagtcagctcaattctatttttaaaagcgtatataaactcaatacttacagtctccgtatttatacagatcaggcccttagaagtctttaattataagatactcaagattctatacttctgtttatatagttactagaaacaactgatacaatttggcctgagctgtgccaacactataattttgaatgtactttcttctctgggtgtgtgaactctcctttacagagagaatttatcatgtgacctaagtgatgatatgatctgcacaatatcctctgggccatggtgtatcttttcattacaggcttttctgtgtgggatttctcattcactttgcaaaggcagagctgaaagcagacagtgtattattgactaagtgctgatgctattctcacagctgaacactttatacctaatttccaccctgtgggtttagaggccaagttaagcagacaataacaatcagatgaaaagtaacttgaggtctcaagaaagccagactcacttaaatttgtaaaaaatccttcactgggatactgcaaaaaatttttccagaagatcacaactgccaagaggaatttgaacacatggtagtttcatttgaaaagcatttcaggcactaaaggaaaaacaggaaaaaaatacaatgcatctgagacatagtccaagtgacaggaaatgtcagcctccaacatttatggagcacatattttaggttgagttcggaaggttacataaaagcaagtggctcgcatgccggaagagttgaacttgggagagcaaaaagaaggatggaaaccagggaggctatgaatatgccaagacagttgtgcacgtgttagagactggatgaaagcagtggttttagaaatagagggaggaacgtgtctaagacatatgagcaagagagaaatacagggacttggcagaatgaagaaatgaaagagagaactcaaaagatggcttccatgagttaggacacaggaggcaagagattatcctcaccatcagtaaagccaaacaaaatgacagtgggcattgcagcaaatcggggatagggattttaggatgagcttggctgtggttatatttaactagttattggcaagaaatctgtgtgacaaaaagctatagtcagtaagaaatactgggctgagggttgccttagtagagtcagatgcaagcgtgtttttagtggtggttgttagctggaaaggaacagagccctggggaaagaacacaagacccccagctaaacttcagaagagaactgccattcatgcatgagggagatggaaggaccacttttcaggatcaaattagaaagaaaaacaaatattcagtggtgctgaagataaagttaaaaaaaaaaagacgggtgttgaatgatgacttaacatagaagcgactgaattcaggaacagaatagaggattttgtgttggtcaataagaaatgcagccaggttgcctggatgaaaaacattagtggtaaggacatgaaggcaatttagaatatatgcattcgaatagtttagcacatagaaaggaaacaagaaaatgagaattgtgacacatttttatggaatctgctggagaatctgttgctaggatttatatttataattctttctttgacctttaggagaccaaacactacaatcaggctcatctgtttgtcctcaccttgtgtgtaacttgctccttcttccttttgcctttgaaatgttaccattcccctgacattccgcttgacacttaaccttaccatggcagcattgtgaggttaatcttaaatcgtgtccttaaacactcactttgcatactattttgtatctctttatgagtctcttttggtctttcttatgtttatttgaactgtgtcacctaaatagatcacctgtccttccagacaagtgttgccagttcctgaccaaacatttctaattccaaaaacatgttcttcatcttgtcattgacatttaatgaaaaaataccatctggaaggtgaaagacaagttaaacagagaagtaaataatgctggggagaaaccaaagtggacagaagtcaaaagtaaaaataaatttgtaatgtaagttgggagggtaggaacaaggtgtattgagaaatgacaaaatggagtgttcctgctaacaacaagcaagacaaatgatatgtttatgactgtaaaagaatgtagacacaatttcatttatacaatagcttgatgtaccatttgtcttctaaatgtttacaggcaggagtttcaaaatacacagtagtcttttcagccatagatgctgcataagttttggcaacagcagatcccagttttctgagaagaactggccttagaagattccaatatactgaaatgttttatggaatcataatcaatacattttatttttttaatgaggttgatttgaatgtgtttccaaccataatattgtatgaatatctgttaatatgaagccattcatccaagaagtggagcagagaaagcatttgtagcctgtagatggctgatttccacgtggttatttgggtcaggatggatggagtgtgagtgggtgactgccacatctctacactcagagatctcctgtaacctcaaattccttagttcattattgatattattataactcaatgagataattaagcaggtttttaatccatgaatcatgagcactttctagcaagtttaccacacctccttcatcatatacaatttctaatgttataaaggcagctaaattcattctaatttcattcagtatattataattagagtaaatagcttggggaaagattttgaatgcctatcaaaccttgtttgtgttcacaatacattgacaatatttccactcaagtgtttaaaatccattaataatattccttatatggtgcacatcaaattttgtgagtccccactatttccaagatgtgtgacctacttgccaatccttgagacacttagatccttcaccctccttttcctatgtggggcagtgggctataaccacccttgagaaagataccttccatgatgtacagaaaggggagacttggctgcctcttctttcttttttggcatggacaattttatatctgttctataatgctaagtaggaaggaactttagcctgcatttggggatcctgagtccttattcatgctcactgccaccagctagtcatatgacctataccatttgattccatgggtctctctctttcctcataatgactgagggtaatgtctgcgttagatagctgtagtataaacagcaacatctgtggatgtgcttctcacagtttaaagttgtaaatattatgttgacattgtttgggttactagccatcttccagactggaaagtgctatacaagtccatattactgttatttgctcagatctggaatgcctgggttggaagtgcatttgccatggtctttctggcatggcctccttttcagtgcaccatgacagagtcaccttttgtgggtgttgattctttgtatagaaaaaggctttgttgtaaaatagagaaaagcttgctgctactcatagtatcctaaaatctatagatttctatgaatttcaaatcaactagaagtattacttattgtccccttccctctaagccttaagtgtgtataccaaatagtattctccagaacccaaacagacaggcaaatacttctctaaccaggagtagtttcagattattacaagagagagcaccaactagaaaattagccttctgccagtgagggcaggaaaatgcattccaatttagcaaattaaaatgatttctatcacatggaatgtaatgatagatatgtcaccttgtggcagatggtagtttccaaaaaaactttatagctacaacaatatctccttatccctacacacctctcattgagaggtagagtctgtgtaccctctctttgaaacttggcaagctgttacaactgtgttggccaatagcaaatagttgaaatgacttttgaggctaggttgtaagatgcaatgcagtttccactttgctacctgggagtagcaaaaccttgggctactatttaaatagtctgactgctctgatcccatcatgctgcaaggaagtccaaattaacccacatggcatgaccatatagaggtcccaagactacaacaacacagagccatgcccaggcatctcccagatgttctcacacctgatgtcccagctccactcaccatctgactgcagcctcatgagagactccagccagaaccacccagctaagagcttcttaaatctctaattcttacaaaccatgggagataacaaaatgattattgtttaaagcctcttaatttagggggtgattttagtgcagtaatcaacaactggaatgcactagaaaatatcaaagtaagtgcaaaaataacttttaaagagaaattttcatcaatatacagttaccaaacttcagcaacttcagaagccccttggcttttttgggaaaaagatatcaggctgttttgggaaattaatgaattatggccacctaccgtggaaaactgtcttcttggcatatctaactaagaacagtatatttttctaatagctcatcatcattgctagaccaaaataagtgcaaaggttgctaataataatgataaacaaattgatgatttagaagacagtcatggtatcttggggatgtggtcagaatcctaaccagtgaatcacctacctttagagtaagccacctggctaaaatgtgactgagtaggccattgtctctttcaacaactacatcttggacttttttccctgtgtctatttaccatctgcaggacactgtgaggagcaagtcatgagaagtatacaaagtctcatggagtttataatcatgtgcacatgcacatacacacccacacacgcagttactaacaatacagaggagattgtgtcccccaaataagtaggactgacaggctgtggatattcacaaaggagaaagttcataatagctaaaatgggcaaggatgactttcagtggagatgggatattttaagcctgaaataaagtgctagggagtaaagaatagctgagagtttgggatcagcaggttttctttaactaagttaagatcaggcccatgatgcccggataagatttcaaggatgaaggctgctttgctccctcagtcctttgagtaagtatcagaaggatatgtcattacacagataatggggaaaatactcagttgcatccagaatgagctagactagtttattgcgagagaaataaaattactctaagtcagacaaaattcctgttcaaataatattaaaaattataaagattttcatctttttggtcaccatgtgctcaaaccccttacaggaatgggaacacacagacaggcaagtgaaagagccagagcaagcactatgggctcctgccccatggtagtgtctaggagtgggtgtctgtaactcctgaagcccatgtgggcatgtgttacagtgcactcttttagctttgccatccgcagatagcttaaagttaaccagctcagtgtcctcttggtacccaggtccttgtccagcgtccaggaaaaatcaggtcacacacggacttgaaggatgaatgtgggggttttactgagcggtggaggcagctctcagctggatggatggggagctggaagggggatggagtgggaagatgattttcccctggggtttggccatccagcaaacaatcttctctccaatcatccccagccaaactcctcttgggattcagacactccttctcttctctctgctatgccattctgccattcttctgctctcctgtttgtctctctccatggagcgtatggtttgtggcttatataggtacagaagaggggggtgtggtgggtaaaaagacaacttttgggtgagaaaagaggaatgcatgttctcactgagggccatgagtttccaggtttgctgggggacctctgccggggaaccaccctcttctacccagtatttccctgtctcctgtgtgtatcaatttggtcgtaatgttatcattatattatgatactgtccttaaagaaaacttgtggaaaatagggaagagagaaaataaacaatacatacccatcatcccaccacagtaatacagcaactcttcattttaacctatccctgcttggggcttaaccatacctacatctgtttcacactgataattatggtgtatatcagtttgaactctatacttttgatttaacatagaatttttcttagcactaattttagcccctgcataatattccttctttctatgtgttacctattgctgaaccgttccccttttatcaaatgtttagattgttttcagtttagtaagaggctttttttcactttttattttttactattctagtttaaattttcaacttaaaaaacatggtattttagaagtcaaggcatgtcctccccctcagcatatgttcatgtaccccattcacgctccatatctgtgacaaatatcgccactttcaaaaggttgtgttcaaaatgtacgacagctcacctcggacgcagttacatcagccatgtgctggcaacacaacacagattgggggatggggcttaaacctaaaagcactttggactcatgataaatgcacagtgatcacctttctcttcccttccccctcaaggaaaatgtgtaatccttgtgcaaaataaaataaatagttacgcatgacagttttcatccctgcatgcacatttccttcattcttcacccacctctgttcatgctgcccatctgccctggaagggcaggcttgctcatctacttcctccagacagcctgacccccacccccactcccaccctgctaggtggaacagggaggcaatgatcacttctaaaagaagagatgacgtcttcttagtcactgtaaggatgacctgggagaaagggccacaagccttgggggaagccagcgcataccagtggggggctggatgggatgctctgttctttgcgggtcccaaggatgaatatgattatatttgtgttagtgcacatattattatgttctgtaattgcattgctaaattgtatgcatacactatatagagaaattatgcatacaatccagttcttcaactaacaagatagaagtttagacttcttaaaataggatctactaaagcaaatgtatgtttaaactctggtgatcactcactatcataatccagtggcaggcctcaatctggtgtaaagcgggtgtttagttactaatagtaattcagtagtaaacttcacaaattgtttatttttcttttcaatgttattttaataataaatctaccatgtttgtttgaaatctgtcctgcatccttccgaaagggaaagaaacaatggaggtacagctggtgtgctggaaattaaacagagcatcacctaccttaattttaacagtgtttcatgaaagctgtaaatgggaatatcatatgtcatgtctgttgtagcaaatttgagaacacttttaaaatggccagcaaagagataaggtgagttcagcaggtccaatgcattataaaatgtatttctcctcttaaaaaccttcagtgatttctgtttgcgtgcaggacaacatccggaaatcacgacatgacacataggggcttcctaggtcttttccttgcctcatgcctggcctctttctggagcctcatccctgggcacacccctgccatatccatgctgaagggcatttgcctcattcatgggcacgtgctctcctccagtgggatatcttcctgctttgacatcctggcactgtgcccagccttcaagatcctctcagttttgtcagcatctcctttctcagagaaactgagtatgatattgtttggaatcttcaaagtggtaggtgttgttttgtagtctaatgagttgactggtggctggtagtccctaggcagcttcaaggtgaggactggccaggattagagggtcgtaactttcatcccacccccaacctctggggaaggaagaggggctgaaggttgagtctgtcaccaatggccaatgatttaatcaatcatgcctatgcaatgaagccctccataaaaacccaaaaggactgggattggggagcttgcctatagctaaaggggtctcccaggaagatgaacaagaacacatccatcctcctggggggtggcacaccccaactccacaggggcagaagctcttgtgctcaggaccctttcagacatggccctatatatttcttcatctggctgtttatttgtatcctctaaaatatcctatgcaataaactgataaatgtaagagtttccctgagttctgtgagccattttagcaaattaatcaaacccaaggagggggcagtgggaaccccaatttattgctgattggttaggagcacaggcaaaatagcctagggcttgtgatctgcatagacgtggtgctcagtcttgtgagactaagtcctcaacctgtgtgatttgaagctacctccaggtggacattgccagaattgaattgtattggaggatgcccagctggtatctgctaaagaaatgattgctcacttggtgtctgtgggaaaacccttacacatttggtcacagaagttttctttattgatggttgtggtacaacatcagaggaaaagcagtttggtttttccaatatactcacccagaaatccacccaattacaacatactttggaaggtcacagaggccacatttgctgatgggtgtcctgccattggctttgcacaggctggcttgctgctgttcattgtgttgtttctgcactcacttgtcaccttctatggttctccactcctttgtacttacccccaacccaaatattaatgcaattgtaccacgacgcctgggccgggatctttgttcatgcctgtgtgacaatgaaatggagaagagctgactattttccagaaaaataatctcagtatgacctgggcacagctgatctggtccaagacaggaatagaaattgtcttgtgaggcttcagtgatttgtggcacggcctcagtcatgcttgggaggcctggttattgacacctgatccattagtgatggggcacacactttaaccagttagaccttggaggaataatgcctgatccatcacttatttctcaacctggcaccttgttggagctcagtaatatttgtccaataaatggttggatgaatctatttatcacaatattttcctaagcagggcctccttgttgtgagaagaaagaaatgaggtccatggcgactcagtctacttagagaggggaaaaggctgcagaaagagaatcaaatggggttgaagtaagggtcctactttaaagtgttgcctacaagagcatcctcattgagaaagggacctgttctgcttgtagaagccactgaggtgaacatcttcttccaatgagaggactcggtcttcatctttgttctggaacagcccctgcctgtgcctcaagcagggggctgtggaaaatcctcttcatccttccaccctgttcagaactttctgggagtcatggtgctatgttcatccagaatcttgttctagcaaacaaatgtgaaaaatcatcatctcccccattcatagctactcttgtgatcatcaatgagaattgctaacatatttcaccatggcttacagactttgacaccctcctacgcacgttctgaagagactttgatgaagcaagaaatgtcctatacaggacatagtaaatgagcttgcttcctgtcttggtgacttcccaaaacccaggaacctggtgatttattgaggcataaaggaaaatattagcacatattctcatgttttattgaaatataagacatggattaagctttaccaatattcaatatatgtagcttaagagttgaaaataaatatacagtactgaagatatgtttatgaaaatatttcactggtggagtccataataaaaataatgctggtgtccattggtctagacaatgttagggtgtgtgtgctctgatacaagagggtctgactggagaaggggttacaggaacctaggtaggaacttgctgcatttggctatctgcatctgaaggcaggttctttctccattgtagagttgtggaaaggcttcctctcacagactgccttgaacctggatgacccagttcatatcaattgtgtttctccatttatggggctgacatatgagcaattgtattgaattatttatgagaaaaaaaaagtatcccgagcttctcaccacagaccttgtctttatgaagaatggggcttcacatcgtacatggaatttgagattctccatgccttactgacagtgtctcattaccatctcttatcagacatcctggtctatcagtaaaatatcattaattttttaagagacgtataatgcaatagagcacaatccttccaaaagagttattataaagctctttatttcttgcaagaaaatccctaaatacatatttataataagtattagaagtctcaaaatgcatatttagatgacaagttatgtgtttagccgtccctgagtacttattttaaaatgttacagagaattagggaaactctcagagacacatctcgacttccacaactgtgatcctagtgagagttattttaagaagcggctgaccttttgtacataggggatagttgggcaccattctaattgccttttaaaaaataggattggaagtgaagtaaacagaatgagttcagagcccattgcacaggcaaagaccctcccaaggtgggctcacattaaatgcatgttaaatagataagataatctctattaaaataaatcaaaatatctaactttttcattcccgttctcccttttctgaccagataatgtcagagaatttccttcttttcgtgcattcattccagacatactcatttattcattgcctatgatgtgctagatgatactggaatgcaatgctcccacctccagtatactgatcaggacatcaccatgcctcttactgtccctggggccttaacaaactcacctcaccttgttagtgtgtttccagtcaactggtcactaaagcagagttgtgtgtccctatggcaggggtgtctgtgaaggcctgacttaaaggaggtgggctttcttctcagaaactggcttcttcaaactgtttacagtaatgtcagggcatttctcagttttatgggcttttcaaatgtctggatttttctagtgtgtgtgctggatatctcataaggtgacctcaagtgtcccacatattttgtttcaattataaaagtggaagggtagtttgacttaagggaaggtgggaataggacaagggatcctagaatattgagcacaaaggtacaatctggtcccttctcatttgaaatatgagcatactggggatacctagagaggtctgtgactttcttggcattcagccattgttactggggaaaaacaggaccaaggggaaccctacaatatcctgtgttctctccatcttttgaagcattgattctcaacaggccacacatcactgccttccccacaagctttgcctcagaacagtatttccctgtgtaaagtagtggaagtctccacttccaatccagggaagaacaaagtgttataaaaggcaaaaaacaaacaaacaaaaaactcaaaaaacaaaaaatcaacaaccctgctttgcagcgaatgtgaggcttaaaagcagtgatgcagaggctttcctgattccttttgcagggtatgagatatatctacctggtttgtccagtgaaagaaggtgcagaaaacacacaggttatggcaaggattttacctgaacaccaagtacacccttgggattctgggagtgggtttcaggagccctgtgaacccaaaatcgaatgcaaaatggttgatgtgcatactactgggcgatcaaaagcttcctcaaagaggcctgtgacccccagaagtctaagaactacttgagtagaatcttggtgaggatgcatggacatggaggatggtggttggagctaccagtgtgatccagatcaatcacagcttcccaatactacagagccctactggtaccatttttatcctagagataaatataagtgctggatgggcctaaggttggtgactggatgaggagtgagaaatcagaaaatgactttggggaaggaatagaaaggttacataggagagcaggtggctgtccctttccccacaaacccaaatcatttttccctcctggtctgaaaattttatttaggtttataacctggaattctaacaactggggaattcatatgatttaagtcctccctttgttctcactgtttcctttaccctctttgcactttctcaattattaaataaaccctgctggatcagtggtcgtgtgaggccaagagtgggagaagagattgactgaggaaaagctggggggaatatttgcaggcaatggacatgctgttggtcttgattttagtggacattgaatggtacattaaaaatggatacattctattgtatgtaaattatacctcaatatagttgatttaagacaaaaaccaaacattgaattgctgttcactccagttcccacctgatcgcgtctttttgtgaaggccattggtacttagtgttggtatcttgtgttgttcatacgtagacctcagttactacttcttttcctggataactcccctactaacctcttagtcccttaaagcctagaccagaacttaattttcgtcactcttctttgagttcttcatagcagcaagcactaaattaaaacaaaacaaaactcactaatgataataacgatgaggcaaatcaataattttgttcaaggagctcttcagtgtccattcagtcttatagaaacctatcatcactactttttcaggaattgagttaagggtgtgtttatcaaccaaaaaaaaaaaaaaactggactcaaagtcacacgacttgtgttcaagttgcagctttgacacttagcatctgtgtaatctgggcaagttactttatgtttctaagctccagtttatatctttacatagaagaataaatatttattttatctacctatggtgatgtcttcaaaaattataagaccacatgcaattagtggtttttgtagtgtgtacatagcataataaaacctttcttttatcataaaaaatactgacatttttaaggaaaaaaatcttgaattttaatgggatgtttttgggtttgttttattttttaaataatattttctgaaacttctggaatatttttattacatgattatgtgattgagtatgaaaaaccattttaaattaccatagcaaattgtttgacctacttcttctctttggcacattttggagatctttactttgtttcattctcattaataggaatttcaatttggtcttcttaataacagatatttcaatttctgttcagtaatttattatggtatcatgtcaaataatagtatttattgaataacagcatgaacattttttatttttaaatgaatgtatttacagttgaaattatccccatgagttttttatttgtttgtttgttttagttgattgttttatgattgcattaccttctcatttgtagttcatttaaaaagaaaaagtaaagctcataccacagcagataaatctccagaatcactatcacttcctgtttcaaaattgaaatgatttttaaaaacaaatctgtgctttctcaactttgttcagaatctaaaatagtgtcaatgtttgccaagctagaaagtaaaatattaggataaaatttaatttccaagttcccaaaaggtcatggagaggcaaatgagaaagataaatttaattaatttattttaaataaaaatgacttaagtgccctttcgaaaaaaaaaacaccctttcaacaaatgtgttttaaacaaaagtgacaatttctatcgcttaaagaacagatatgaaaaaagtaaatcaacaatgctaaacctcacatagaaatccatccacagtgaatctgtagaggttatgacaacagctattaaaatgatagctattacattttacaaatcagctattaaaatatctgagttcattatgtgcacaaaagctttacatcccactgagaagaaagagctgggaatgttacttagggtctatctgtatttcgaggtcagggaagagtccaaatttatgtagtaacagcacgtctgcaagttttcagtttgcttccatgaactaaaaccaatagccccactccacaaagaggcagaatcaaatgtcactggtttgatctacttcaaaacaggagccacttctaatagctcttttcaaaaagatggcgtagaagagagatcaagagcccatgtggataccatctttggccagaatttctggcatgccttacacaggcttgaaaagtattgcaaatgaagctacaagatagagtggtcccaaacacctcgaaaaaggagccctcctcatctgaggcccagacagcccatgctctttataaaagcttattttctattgatgctctttttggccatgtgaatctgacgccccaatgattgtggctgccactgcttcatgagactaaaaaatgatcaagcaaaagcatactgctatccagctagtgttgtgagtggtgcaagacctgtggtgtggttggtggagaacatatttaaaacagtacagtttttccatgcactcagtgggcatttctggagagcctggtggatatatacaaggctctgtgctcataagatacagataagaatcaaaggctgtgaattcttgctttcttcaagtttataatacacctaaaaatttatggtttagttttaataactgaatttctacccattagtactccttagagtgaagcagctttttctctgaatgtcgcttaatttccaaggcaattttacaacttgtcattttgatgttccccagttttattcttctggtaccagaatacaatttcatgccacaaatgtgtattgaacacctttgttaagcaaatttctggggcaatagatagatcgctgcccatgaggactgcatggcatcttgtgaagactacccagcaagaatgcaatgagctatcttgagatgggcactggaggtgaaataacctaattcactgtgagacagctaaagatgccttcacagagagagtttaccatccttgcacatgtgcacacacacacacacacacacacacacagagctttttaccccattatttatctcacaggacatactgacattatatgataggattcttattcacctcagcaacctaatatgccaacttttcacgtacatttttttgagtcctgaagacttttcattacagagttaccccttttaaaacgcagatgctttgtaaatgaattatgcctgaattgtattcccactacagccaggtagtatggggactcagtggttttgagcccaagctctgcagtcagtgtctaaatttgaatcttggctttatgatttattaactgtgtgaactgggcatgctaactggatcctgtaggcgttgattttccactctatgatagaagggttaataatacctacatcaagggagtggtaggaatttgagatgatctccttaaaaaacagcccagaacctagcacatggtaagcactcaataaatgttagctattattattattattattatcattattagttatccacagacactctagttggaaccagaggaataggagtcaggcattagaaggagggaggattaggagaccataattggaggaagaataacaggagttggcaggacaattggaaaggcactgaagaaaaatttagcagatttccttccctgttcacccctatatgtccctctttccacaatcccagcattagaaaatacaagattcaatagttaaaattcaaacaacttgtagcaatatccagattcattattttctttcattcttcttttttagtttttattttcacaaaatttttggaaaatgaaactacattcatgcattgttttgacacactgtgtggagcatccacactaggtgataggaatagagtaaggagtaacgtaagtgggaccgctgccttccattgataccttctctgtcactagtcaactctgatacacttgctgttgggaatatagggaaaaaagaatctctccaggatttaaatacgcatcctaagcctccaaaggttgaggtcaggcctggtagtggtcctcacctatcttcattgcccttccacatttctcaccaccattaactccactttaacagctctggcatcatgaataactgatgaattatgaagatgagaaagaagagaatggcaatcagaagcagatttattgtgaatttaatgaagattaagtttcaggaatgcttacttgcccatgtggcttcaagaccctgggagagatcctgatatagtaataggttcatgtagtcatgagttttcataggatttgcaaaaggaaaacactttattgatttttttaaagaggggaccctcaaattctatagcttcagcccccctccaagatggttccactctgccatgatgatgatggcgatgatgattaatagctaatgttattgtgattattgtgggcttattggatgccaagcacagtggtaactgctttacctattatcccacttaatcttattgttctttaggagcttactgacaattaggatatagaaccagcaggaagcttgaccaaacaaggtgttggaggcaacagattctgtgatctatgacttacccccaaaattgaagaaccaggtggctttctctacacaatacttcttatcatggagtccatacacctccatggtattcatggaaaattcaggagtccatgaacttgtataagaaaaatgaatctttattttcacttacctctaattgaaatgtaacagtcctccaattattaatgcaagattcaaatctaagtagtattagcagttgctgtgattttatcaccaaaaaaatattttaatatcacacacagtccttagagatatctggaaatattatttatgctcaacactgcttcaaattattagagctgccgctagaatttctttcaacattataataaagaagtacatataatagggtacaaaatgaaaagattacttctacttttagcagtgaaggaccagagactacatttgtgcactcaccttaaacaagtaaagaaaaaaataataatatttccaaaacaacagttttaggatacgcaataggcagtgcaaatagtaatatctgatagaagggaaacaaatgaggtaatcactgagattgtctcagtttactgctcaagagtttccaggaaggaggatctgaaacagatggcggtagtccccctgtagttagcagatggatttgagaattcagggaggccacagcccctagactttgtaagacagagtactgaaaagaaagagctgcacagagagaacgcttttgaggtctccataatgagtgttcccaagtcttctctgcattctcatcagtatgagggtgtgaggaaaccacccacatcttgagaaagaaccaataaagaagtgggtgaaacagtctcaagagatcacataaggctggtaagaattttcatccttccagccagagtggaaaaactttgcattatacagggcactggcaatatacttggaactgtattgccttagtagcaataaaaaattattcctaaagactgctctggtcttctataacaaagattataagcaaggcttgaaaagcttaccaaataatttatttgggtttcagaacaaatctcaaacctactttaaagaatacaaaaatatccagcattcaaaaatataaaattcaaatgtcaagcatccaatacagacttacttatacacacaaagaagaaaaaatacacgttttattaggagaaataacatcaatcaatataagaagattcagaaaaaaaacacagatgaaagtatcagcacacaaggatattaagcagtattataagtatattctatatgttcaagaaagtaaaagaaagcatgagcatgctaagcacagatatggaggataattaaaaagacctagttcaaacttgtagagataaaatataactgcccaagatttaaaaatatgtaggaagagactatccgaagattagacactacataagaaaaggttagtcaatttgaagatattcctttagaaactaaccaaatttctcacacaggatactttcaagcaggctaatatatttgtaattagagtactcaaaaggtaagagacatggaaaaaatatttgaggaaataatgggtgaaaatttacaactctgatgaaaaatatagacccaaagatccaagaaactcaataaatgccaagcacaagcacaggaagaaaattacaccaaaatgtattgtcatcaaattgctgaaaaccagtgataaacagaaaaccttaaaagtagccaaaagaaaaaaaaagtcgcaatgaatacagacaaaaagagaacataaaaatggctgcagacattgaaaacaatgcaagccagaagacagagaagaaacctcttaaagtactgaaagaataaaattttcaaccaagaatttatactcagcaaaatatctctcaaaaccaaaataaaaatacgaaatgtttcagacaaacaagagctgaaatctagatctatacaaagtaataaataacactgagaatgttaaaattgtgagcatatataaaaatactcttaaaaatctctttaaaataccattggttatttaaagtagaaattatactgatgtattggaggttttcaccatatatgcggtagtatgagaatcatagttgaatattttaacaatttatttcaataaataggaaatttatactaaataagaatataaaagacttaaacaatgttatcaactaatttaacctaattgacattatggaagactttctccaataacaaaaatacacattattttcaaaggcccatggaacatttaccaagatagacaatattctgaccataaaagaagtcttattaatttaaaaagaattcaaaatatgcaaaatatattccctagccacaatggaattaaattaggaattaatagtagaaatatatctgcaaaatacccatgtattaggaaatgaaataacacacttctaattaacctgtatgtcaaagaagaaatcaaaagggaaatcagaatgtattttgaaatgaattaaagtaaaagcatgaaaaataaaaatgtgtaggatgctgttatcacagtgattggaaagtgactgatagtactaaacacctttttttaggaaagaagaatggtctcaaatcaatggcatatgcttccatctaaaaaacctaaagggacaaaaacatctgaaatcaaagtaagcaaaagaaataaagctatgaggtcaaaaccaaaaataaataaataaataaactattaataaagaatatcagtataaatgttgcagacaaacactaagataagccccaatgatttccacctcctagtattcatggctttgtgtaatcttctacccttgagcgtgaatgggacctgtgacttgcttctaacccattacctatggtaaaggtaatgagatgtcattcttgtgattaggttttgttatatagcaaaggtgataggatacagcccccatcattatgttgcattatgtgaaactctatctcagcagactgaagccagagattcttcttgtaggcttgatgaattgagtgaccatgttggagaaatccatgtggcaaggtgtgtagacagcttctagccacttctggtggcctctaagacctcagagcagccttcagacaacagcctgtagaaagccaggcccctcattcaaattgctgtcaggaaatgaatcctgtcaactgcctgaatgatctgggcatcagattcttcccagttgaacctgcagatgaaaacacagcccaccaatacattgattacagccatgtgacatattttgtagactgacttgcagatggcttgattattgaatgcaggatcatctgagagaaagaggagaatcaagaaaaacctagcttggttttgcactgggtggtggtgacttactaaacaagacagaccacggagaaacagatgaagggaagtaacagtggaaatcaaaaattctgtattgactacactaaatttgaggtgtttacaatatccataagtggaaatatttaaaattaaaaacttttataataacctcaaaacaaacaataggttttctcccctctttcccctgcagctttgcacttaaaccaatattaaattcttaagaatttctggtggagagtctattaaattctacttaaaaagatttcatctctgggtgataacaaagataactatctggggaaaaatgtggagtagtgcagagtgtttaaaatatactgtatttggttcttctacttcaatttcctaaataacacatgaatttattaaataaaatccattcttgaaaatcaattccactaactcctccattgaccttttaagctctttagatccccgtattcaaatccccaagtcagggagtttcaaaatcttacatacaaacttaaaaaaaaatgcctattttctaggttttattaaggcatagctaggtgaggttaaagtcatctaattagccatcccaccactgtgtctcttcatttgcaacattctgacactcagctatggcgaggaattctcctcctgtgaattctcagaaattatttagaaattatttagaatctaatttttatgcccagggagctcagtaagaaggagtcagtctcattactgcttatcagaaattactttttgtctcaagtcttctttaccctgaaaagccaattttgataagaagtgaagatttaagccaacaagaaggggcaaatcattgcaagcagtgatcaatgaagttgggttagccaggcttatttagagtagtccgagaaatcatcttgctgatgaccaaatcttacaaaatgatgagtacccgactctcaatgtgctttgaaagcactgaagggaaatcatatatctgctatgattaaaaactacatcatgatgctgtgtgcttgaggacagtgtataagaaggaagaaagacagctggaaatcagtgattcattagtgttaggtgttaatgtaattgtgaatgtttttctttgtcttccaaccttttgtgcagataatattgtgaaaggggaatgaggagtatttaaacatattgcaaaaatttcctaatttttatttaaactataatagaatcatcaaactgggtgaacaaacaaatcccagttttggtaaatgttatagatttggtaaacgttgcttataagtaactgagatgtttcttaccaataagcactttaacataaaacagcagatttaatgacccggaaattaactcaactaactatgccttgatcttgtgaaattactgttggtatttgccctaaacaggcatgctgggtcctgtctgtggctcacaagtccccagatggtgtgactcctgcctacttcctcttcctgcttcctccagccacttcctctctctcactctgcccagccctcctgaccttctttttgctccttgagcaagctcatttctatgccaatgcgtttgtacttgctcttgtctcagcccagaccactctctgcttggtcttcgcatcactgcctttatttgattcttacttcaaacatgactttctcagagaagcctttggtgaccacattgcctaaaataatggcatccccacctgcacctcatcatctcatcacactgtcattattccacatgcagaaaccttgcactctgaaattgcctttattcattagactacttcttcattgtctccccacagccactgccacacacacactcttgaatgtatgctgcataaatacacagaccttgtgctttctcccccactattatatctgaagcactggaaacatcacctagcataaaggagtcatctgtaatatttgttggacaaatgattaagttgaatctagtagaccaagaatctgaggtttgtccatcagagttaaatttcatggttattacacatagcatagaacagtatttccgtcattaaaaataatattaataataataatgcccatagcaattttttaaattggtaaagtgaggtgtataggatgttcgggaaaagcttcatcttggaaatttaattgctttctgctcttcaatgagtcattctatttggaatggaaaatctagtcctcatatgttaatttatttaagagggatgagctaagagcaatacaaaccgacagatagtcccaaagggataaattcataagattagaacttgaagggcaaatttgtaaaatgtgtgaagaatgtatatgtttctgcttgtatattcatatttatactgggatgaaagaacaatgttacctcccagtgtgcccaggtccaagtcaatgcataccaaggtttgatcctgccacatgagtaagataggcctggtgtattaccagaaaatactgaatatttcataaagttactatttggtgattctagatactgatgtttttctccttttacatcctgttagcgtgattcatttcaaatcttggtactaccatggagtttttccagaccacgccagtgtgatatactcttcccatttttctgacatcctgtagcaattattggtaattaaatgtggcctgccttttgctatttttgttgtcttgaactcttacttggggttctttttgttttgattgtttggggctattatttaaaatttaagtcattatgactcgtttcaccaacaagatttttaatgcagggatgatgcttttaaccttttgtgctttccacaggtcccagcacagtgccttacatagcaggcaagcactacatatgttgcctcaccagcaattctggaaggcaaatgcttcatgtatcccaaatgacccatctcggcctctctcttctcagacgggaactatataggtttttttttaggaaactgaacctccttcctacagcccttttgaatattgatctggagtgatgctgttgctaccctggacataaacgtatttcttgtttccctgccatcagagattaaatcgttgactgtaatgaactagagttaaaactactaggttcttcggattttcagatagaaacaaaaacacattagttgtggtggtttgttgttattgtttttttcctgtttctgtgagccatagcgaattgtgattactctgttcacaatgaatagataaaaggccttctctttttcattattaaggttaggcaagagtgcaggtaattttatctcataaagattacttaattcaccttgggtgaggggagaagggctgaaataaagctaaaacctgttctgcaagaacccagcctttatggctctgtttgtcctagtctggcttataattcattagatctcttagcaaaacagatgtcattgaaagaggcacatggacagagagaaaatgcctgaccataaagagacgtagctacaagaccaattcaatgatgaacttggatatggaaaggactttttaaaaaaaatgaagaaaaggatcttcagtaagtaaataagactacctcagtttcctgaaggaatagcagcaatccatgataacagtaacaaaaacaaccaggatctaaatccacctagtttttcattttggtgcaatattttcaattgcaagctgggttccacagtgaactctgcatgaagcttgtaattttcccctagaaatatttttcaagccttcagcggccctagaatgttcaagctggtccttcacagttatccacatacatgcacccttttcttcacaattcaaaactttcttctccataaatcctttgctgatcatctctgcccatgacaagttctcttgactcaattcgtatagccctgactgcatatatgtctcctttaaatcttaacacatgcagtacatttgcatttacaaaggaaaataggctcaaacgccaaagtttctcaaccctttgcaatgtatttccaaagaaaaggtggtggcagctgaagcacatgtgtgcgtcatggtaggcctaagagttgtagagtgtgttgatagtatgtcgggggaatccccgtggggcccaaagggaacacaccttaaagttggacaaacttagatctgaaacatgtcttttgtagtttactgtgcgactgtattagtttcctgtggctgctgtgaccagttgtcagatagttggtggtttaaaacataactttattctctcccagttctggaggccagaagtctgaaatcaaggtgtccacagagctgcactccttctaaaggctttagggagaacccattccttgcctcttccagcttctggtgtctccagtcatactttggcttgtggctgcgttactccaatcttcacctctgtggtcaccttgccacctcctctcctgtatgtcttctctttcgtttatctgtcccccagactccctctgcctctctctcataaggatacatacacatgattgcctttagggcccacctggataatgcagaatgggctcatcccctttttaaatttactcattcacatattttgctatataaggtaatattcacaggtttcaggggttatgatctggacatatcttttggggggctgccattcaacccatgtagtgaccttaagaagagattttaacttttttttagctacaatccctcatcagtaagataaggttaataaacttttattgtcaggcagttaggaggaataaagtaaaatatattttccatgttaagtatgtgttgcaggatcatgtagggtaaaaagtctttctctggatgctattgtaataaattcagcccctgcagcacccccaccatagaggtgtctcatatgtgctcgttaagaaaaggcacccatcctgcttcaggtgcctttggtgatacccattgtctctgcctcatgccgaaccactgccaccagtgtccagtccatgccaaggactcctgatgctcccagatcagccaacagtgtattccacatctgggcctggcttttgctcttataagatggttggtttgaggaggtgccagtatgcaggcatggtagctaattccctgccaccactgtggtgtgactgatttagtcaagccctcaaggagctaaaattttattgaattatttatagtcctccatgtgcacaaaccaccctgcacccttgtcaaaatggaaagactctctctctctaaccttttaatttaaatacctcttaatggatgagtaccatatgttaatatatgagtccatacaaagttaggtcagaacacaaatcaaagtgacagtcccatggattgctccaccccactgataaaaggcactgtcatggaccaagtgggggtttgcctgaatttactctattaagagactcttaagtttcttctgcaaataatcaggtaatttcacaagtttgccatatatgtatgaatcccagtgataaattaaagtgagcctcaagctagaatactctgtttctctcctgttacacctcctggccctccctgactcccctcaccactcacagatacacaacaactaaatgtgccttgcacagcacctagaacatagtaggtactcgataaacacaagatcgtcttctgtcttgtactcacagtgctttgaacacagcaggtagtcagtagatgcattttgaccaatgtgtatctggatttgtaatgtgtaagaaatattgaaacattcctcataaaatttcaatcatttctatttggcctctaactctaacctctttcactattaattggttcttaataataagcccctaaatatagatgtttgtacaagaagaagtgggcaaatagttgtccgcatcccagttaaaattcttattgcctagacttagctttgcaacattgctaggtggctaaattattgcataacttataaaggggaaaggtttctgactttatgttctaaacgcagttgatatggtttggatttgtgtccccacccaaatctcaagtccaattgtaatcccccgtgttggaggaggggcctggtgggaagggattggattgtgggggcggactttttccttgctggtgtcatgatagtgagttttcatgagatctggttgtttacaagtgcatagcacctcctccttctctctcttcctccttctcctgccatgtaagatgtgcctcctttctctttgccttctaccatgattgtaagcttcctaaggcctccccagccatgcttcctgtatagactgcagacctgagtcagttaaacctcttttcattctaaattacccagtctcatgtagttctttatagcaatgcgaaaatggactaattcaccagtaaagggtcttgccaattctgcaataatattacctattggtttcctccagggaacttgacatgcttttctgatatcaaaatgttcatatttgtaacttttcatagaaaagataaagaaaataatgtgtttttattttctcccagctttataggtggtataattgacaaataaaaattgtatgtattcaaggtatgcaaaatgatttgatgtacatatatattgtgaaataattacaatcaagcaaattaagatgttcatcacctcacatagttaccatttttttctgtgtgtggtaagcacacttcagatgtactgtatatgcaaatgacaaggatgcaatacattattattaactgtagtttccatgttgtatattggatgttcagaacttagttcattttataactgaaattttgtaccctttgacaaaaatccctccattactcccaccctctagcctgtagcacccacttttctactctgtttccataggttaggcttctttagtttctacctataggtgagatcatgcagtatttgtctttctgtgtttggcttgtttcacttagcataatgtcctcaaagttcattcatgttgacacaaatggctaattttccttttgttaagggctgagtaatatattccattgtaaatatttatcaaattttctttatccagtcatctcctggtgaacacttatgttgttttcatatcttggctattgtgaataatgctacaagaatgtgggagtgcacatatctctttaatgtatcattaataatttcatttcctttgaatatataccgagaagtggaattgctagactgtatggcagttctgtttttaggtgtgtggttttttttttttttggaaatggagtcttgctctgtcttccaggctcaccagcttagaggagtgatctcggctcactgcaacctccacctcccaggttcaagtgattctcctgcctcagcctccctagtagctgggattataggagtgtagcaccacgcctggcttttttttttttttttgtagcagaagtgaggtttcaccatgttggccaggctgatctcaaactcctgacctcaaatgatctaccgaccttggcctgccaaagtgctgggattacaggcatgagctactgcacccagcctatttttagtttttttgaggtaccttgacacctttttcataatggttgtaccaatttaaaattccactaacagtatataagggttcccttttcttcacaaggataataatttttgttcttgtttagaaatgagaacatgaagacctggaaaactgtgagttatccatatcaatgtaaaaggcttgtgccctccctgctacaaggctgagatcattttagaagtgatatgccaagtttccaagcatttattgtaatttatgtttcatagaccagttatcattccccaccctggaaatcactgtggattgacacactccgggtctggttggggccaaggaaattaaagtaattatgatgtaaacatgtcggtattaatgctaatgcttgctagaagaggcaatgtagagaaggtagattgacataaggccatataccctgtgtattctcatttaatgtttaaaggctgaatatgcaagaatgttggcaaatttctggaaactaactactggaaaatgttagctaaatggtagattgagaagtagaggaagggatggaaaaaaagctgttgaattagggataactttgcaagcgctgacttaggtgcttgcgaaatggaagtggagctgtttctctcttttttacacatcatggcattttgctagggattaactcattgtctcttttctttccctgccaggatgctaagagatcattgatatagttctttatcactgtcgtaattatttctgtaagacctacaccggcagcatcggtgccatttagtaaatgtgcctgctccattaggaagcagaaagaagaccagtttgaactccttcccctactagtaatgtgatctggaaaaattgtctttaattttacggccttagtgtttcccctcatctgtagcataaaaattatattataataatattataataccgacaggattgttttgagacagttaatgtcacagtgcttggtgaagcataggccaatacatatgttatgtaaataatggtcttatgccactgattgtcacttattgcactagatttgactgccttcttgttggaaatacagtacaatcaagaaaattagcaacttcaaccttgtttctaatttaaatatatgttactgtgtgtttgtgtgcgggtgtgtgtgtgtgtatgtgtgttcatacctatgtttcttcatcattgaaaatgcagttacagctgaaagtgatttccattattggcattttctcatgatagcagaatttatcctgaattaacagcattagcagaaatggagactgtttcaaccactgcaatcgaagaagtggtaaaatggtgtggaaacaagtgtctgagcactagctctgcagggaaacaggcaatgaggagcaagaattgtcctactcatggtactcagtataagtgggtgaaagctcggctctgagaaaggacacaagtcaccaagggccatggtcagccatggtggctaacctcagaagaggcagttgtagatatgaagtgagctgtgttacgtggagcgagttcacagcaaagggggagttatcaagagcagctgacccaataccttccgaaagatcacctgcttatcaaaaccctttattttacatattttgctgttgacaggctgtgcaattattaaagcggcacttttccttacttatcttctacagaaaagatcaataaagcacagattgaattgttaatatccaatatccaggtttgaatagtacagataaaattgcccacaactgttagacactcaggctaaagggagtagcccttcccctgggctgcattcgcttaccctcatcaacacactaggaagccattcagaatgatttccaagaccaattcctcctattccaccctgtctagactttcttggaatgttttatgtagaaagtcctggattttccttttcattggcccctgaactcttgaggtctctgggtacggaaagtctgtcactgccaaatttcctgtcagcataatttcttacctgttttaagtaaataacccatcttttctgaactcaatggcatagtgagtagtgggagctgtctgcccagaggaaggagtattttatcactgacatgattgagaattatcagtgcaaggtgatgataaaaagcaaatcaacttttaattgaactttattatgattttaaaactcttaacaggcagtgcacccccttattgccccaaccaggggcggatttcctgccttggaatgcctgaggacagttgctttaaggtgtgtgtgtgtgtgtgtgtgtgtgtatgtgcacgcatgtgcgtgtgtgtgtgtgtgtgtgtgtttagtggggggaggacttcaaaattgtcttcagtttttttcattttccttttctttttgagaaatgttaagaaatcaggacacttcaacctgttcagttatatatgcagtaagtattcccagagtactgttagattaacaactccagatattagaattacaataataggcaagccctgtttcatgcccatcagtagctcagacatttaaacatcctccagattctccagaaagtgtttatttgctcatctattgtaaaagtatttatcaaatacctatcatatgccatgtactttgctggatattggagataaaattaacaaagacatccttgactctgtcttcatttagcttccaatctcccaggtatgcttacctcccttcttcatgaaaattctatttcccaaactcagtcacttattactacttttaagatcttttgtatgttgatatattaaaagtgttattatttacttaagatttactttactcccacttaagttgaaaaccattttataaggaaatactttatttctcctctcagaaaagtgtgcacatgattataaactccacgagactttgtatactaatcacaacttgctcctcacagtgtcctgcagatggtaaatagaagacatataaatacaaatgcaatgaaaaaaaaaaccctattaataaattctagttgaatcttgtctaccaatacccaaattagttaaaagagagattagtacagtttagagacatactttaaccaaaataagacttttcccatgaactaattgtaattattggaaaggaaataactttgctacggtgtgccttggtgttactttattccatgtccttgttccacctaatggtcttgcttacctacaataaccatgccatatgttttgtcaggccctggtcagcactgttggattacttattaagttttgcatggagaaatctttttgattgaaggcctagaattgcttatatcaactggaattatgaacctaattccaatttattttctctttttttagtagtctgtaggtgacacattttcacagcatttgtagctatcccaatatatttttgttctttttttttctatttactgtagaatgcgtaatcctggatctcttgttcgcaaatcgacagcctgaagccctctggaagcccaagactgctggaggtaaggcatgaacttttttgcaattatgtctcttctgcatggaatgatactgctgtttgatttaagtttgaacttggaagattcattcctttagggaaatatttaacctaatcttgatttttgcctcaaattggcattagacgagcttgactaagtggtcaggttgggttagctttacagattggattcttgatttaatacagctcaaactacaagtattattattattatctaaaccctctttgccaatttagaaaaaaatataataggaggagaataaagataaataataaaagcactgcccaagcacaccgtttgaatcataacctgggtcagtgagttgcatgccatacactgacagtcctttgtggggtgttcccaaattttattcaatgtaaagtgtgttcttttcataaccaaatgtgtacactgtaatggccttgtctgttaagcagccacacaggaaggcaagttgcatgatgcctatagatggaaatactccaaattatgatcaagtgatgggagaagcagcagccaagtgccagagagagtctgtgagtggacatgtggctgctgttcctcatgaatgttggtgggagcagggccagggcagtcgacaattctacgcacacagtgacacggcattgggtgactgagtggacttcattgtgactttgcttttatagactctgagacactgacgcactgtcctagtcattgtgttgaaatcattgctgactcttagtgatgttttcagtttgttcatctccataaatatatcttcaagattctggtatgtttcaaactcccactttcccccccagaaatgggtctttctgattcaggattcaccttctgtcataagtcatactttcttaattgttactttttgaaatcaagttatgatatacaccttgcttaaacattcaactccttcagtaattttcttgatattttcagcctttaagtcctacacaatctgtcgtaaagactgctgctctggcagacatgagcctttatgatttctgtctcctgtgagggtctgcacctactgaaaggttgattctctgagaaaggctgaattaccatgagatggcagtagagagcagcctggcagataagcccatattccttggtatttgagccagactaggggctgggcctagtgggaggagctagattacaaggtagtctgcttttgatttttaagtgtcttcctgggaagagagcgaggcatgtctatgaaagaaaatgccggtagtaacatctgaggttaacaaatgtgtgtcaggagaatggaagacaattcctgaaatataccaacctccggtgatcagagttctacctggctgtgctctttctctctctctctctctctctctctctcacacacacacacacacacacacacacacacacacacacacacgaaaaagagaaagagagagagggaagggggaaggggatggagggagagaaaagagaatagatagaggacacaaatactttatccttggaaagcaaggttaagtgagatcagcaaaacgcaagaaggcaattgtgactgataggagccacgcaggacagctgaagtttgagaccatattaccttggctttgccatttcgattctcaaaggggccaaagtgctgccggattagacactagcatgggctctaaatcctgtgtattttaatagcccctattgtacagagaaataagaaaaagttaaagatggatggcatttttaaaacggttgcccagaatgtgccatgtcttgcttaagtcacttattgcactactggcagtattagaattagaaccaagtccacatgccctaattatcggtaggccatgctttccaaatcacaagagcaggagcaatttatttttctctcaaacagaaaagatattaaaagggaattcaaaatgaccctagaactctattggaggaatgtggatgcctccatgtagtagaaggaacatggggctttgtggccaaagagaactggtatcaaatcttgcctccatctcttataatctatgtggcattaatcttgtggtttgtgtatcttaatttcttctgagctttagaagaaatcaataacatattaaaaatatcaaaaatatcaataaaaataccaataacattgatataaaaagtagaattgaggattaaatgagatacacatatataaaggagagataggtgaagactgaatcctgaaattgttcaatgtggaaaatattgatttgatttttggaactggattctgaagtctaaggtaggaggtagaatcactttttttgggttgaagatgcttttgttctgtcaaggactacttgcctggttgcttatagttatgcagataatagagcaaatgacacccatttttctggagaaagacagtgccaatgttttgtgtagtacctgccatttgaaactgtaactgtgataagttagacagcactctgctctccaaagagtcatgggaacttcctggaaaagagacattcagactctacgtcttctctagggtcagtctgaggaaaagaaaatgctttgctaatcctttggacagccgtgagactggggacatagatgagaggaggaggcagacaggcctccctggaaaggagtggcagcctcaccctcacttcacagctggcagtacccactgcactctgggcccttcccctcagccactgcagaggcagctttggttccagtccaaaaccggggctagagaagatttaggatttgtggagccagtggacccttgataataccaggccaaatcagagagtcggtacctcttgagagagggtctgtggctgggccaggggagttcctgagccaagagacaccaaggccaactttggaagtcatctacatcacctgtcaaagccagtaattatgctgaagtcccctgactcacattacacactctgaaagaaagagagtcactagctggctctccatcaagtcctcaggaagtctatatgtaaaatagagatttggtaccagcattatgcctcttcataaagtatgaacttaaatttttcatgcgttagagaattggggttaatgcttaaaaagaaagcttctcataaaataaaactaatgaaatatggctctgaacggatttcagagacacgtcttccagactgcctggggtcccctggaaggaaaaggtttgctctgattatcagcaaactctgaaaaactgtgactacactgctcgaaactcatcattttctttctttttctttgacccagaaactccttctttccccttggactcttaaaacatctattagtgactatattgtgatggtggctttgtaatctcgcaattctggctcttacatggggcaagaaaaaaaaaattgttggcaagctcatcgggttctggaaaggctgtgcctttcccagctggccaggggagccggaagcctgggaaggctgtccacaggctttctggcaatggtataggaagaaaaaaggagaaggaggcttaattcctagctggctggaccttggaaggtggcctcttttccctttggctcatgaagctgaatagaaggccaagaattctagctgagttcctgtcagcttgtcgccttgcttttggactcatggagtgaactgagttgagaagaagctgagggctgcctgaggcaggcttaccactgagccatgaggaagacagaccctccctgtcacaattggagtcagaatatcttagccagaggcctctctcctttcaatttagagaagtagattgaagagtaaatggcctaattaattgtagaatgtttgctcaatatttgttttttttctattataccatgaaattaccataaacaaaaactacacttttatttctaggcaatgaaaaccttattgcacaaagggtatgtggcattaagtcttaaacttacaagtatatctttcacagcaaatgtcacatgactttaaaaatcatcttaaaatatgattcttctcaaagcgtcttgtgtgacttcaatgaaatactcatatgtgcagcatccctctagtaggtactgacttattaaagccatttaacacctacgcaagttgctacatgcaaagaggcactaagtcttcgttatatttgtttcttcagtgcttaatattgaggcaaaaacagtgatgctcagcaaatggtccctttgtcattttccctgtattccttggcccttttgcaatcagacaggacactgtgaccaactctagacaatgacgtgtgattggaggtaatacgaatgtcacttgcagactaagagaatgaaagctctcatgcaatgcttcatgattctatggtacgatgttgcggcacgatttcatggccatctagcaggcatatattctggatgatatagctacagggtgatagagtctccttcaacttggatccttgagtgactgtgtggagcagagtccctgctgacatttcattggctataaaatatgagcaagaaataagcctttgtgacattaagtcactgatatttaggtgtcagtttgtggcttgcataatagagcctgacctgacaagtgccaagcaattagtgtacattcagttaatttttgctgaaaaaagaaagcgctctcatttacctaaataaaagcctaaatcataatcataccaatagcaatatattcgagccctgtttgtgtgccaggcattgtgctaagtcatttacatttataattttattgatgttgcataacaactctataaagtatcatccccatttttcaatgaggaaaataaggcctagaatagctaaatcttgtcacagaatgtcttgaaggttctattcaaactcaagaattctaactgtagaatcctttgcagtgtatctgattttcatttttctgtatcatatatcacttcctttgttggcagattaaatgtttgtgtaggcaacctgaatgctagctggaaagcccccatacactcaatccttattcctaaattcaacaagtcttcatgttttaaatcattgtaagagagcttgcagttccggataaggacagagttgcatggcgcagagttcagtagaggaatagaagctgaaagagaggaaagttgccagcatcccagttcatagtaagtcagatcttattagataacttaattattttgtttgaaattaggtctgaaaacatggtattaaatcagttttatctgtaaattaaaaaaataattactttttccaaagtttggatgatatattggactggattacccttgcttcaatttcccccctttctaacagtctaataatgcctctgtattattttattaaacagccctggctaaagatcagaaagaatacatgagcaatttccttgagttgtctcatctatgacagtgctgctgaatggagggcctatagtgggaagtttgggcaaagtgtggtgaaaacaaagagaattgttggtgaaacctgtgccacaggggagggacatttatcatggatcctgagggagacaggaacatattccaggcagaggaagtaggttgggcattctcagcacaggcaggtagacaggaaagaactctgtatttgaggtgctggcacttcatttattcatttaactttacggagaatgctgggaattagttgaagcatagatttcatggaaagatgagtagagaaatgaactgcaaaagttatttaggatcaggttgggaagggatatgtttatcttgctaatttaaagagttcatttaagaatcctaagtgaactttataatcttaaaataaaagcttttatttaataaaaggagatggacctaattattgtactcattttatgtgtgtgaagcatctgaaaatttcatatatgttatctccaggtttaattaaacagaaaccaatggtggagcttagaaacagcttagaattatgtactatttcttccactaatggtggagcttagaaatggcttaaaattatgtagtatttctttcacttatccatgatccactttaaagccttcctcatgctctatctccttcaataaaagcctaaaattgtttagagacaaacactgggaatgggggtggggggagcatgaatatataaagcagtgctgacacgccccaggcataccgtctgatttaattcagtccgttgtttgtttctcccatgaactcatgccatttactctggcctaagactcctttttctccaattcctagactttttgcctgactctggtcagttcattttcttagcacccctgtacttccctccttttctgagagcccttggtcaggtcgtatctttaaatacaaatctatctttcatccaaaaatgtgtcagtacttgaagaaacaggagaccgtaatacttagtagtcatgtaaaaggatcatagtgtatacttatgaaaagtccgtggtgtgggatcaatgttgatgaatcagaaaactgacatttcataatgtggaatatattttatgtttcccagcatgttaattcatttaaccaaaatgtattgactagattcacaaactggatatttttttaaatatcaggaaaatataccctttccctgaaattaattgcgtagcacttgtttttgtttttgtttcctctgacaagatgagtgtttttaaataccacatgaactcttgctggagtctgcatgtaaattatgttatcagtcccgtcctaataacctggatagagtatgcaatgaggaacacctggtgctcatacacattaccttcttggggttatctggttggggccattcattttagacacattaaaaatgcctttccataactataaagagcttacatgcccaaccctggccagctgccactcaagtgttgccattaatctgtagcagggaaagatcaagaatgacctggaataacccacttttacaacaagaaaaaaatgtgaatcacaaattccagtagttaaggattgaaatcatcattttatatttggaggaaggcatattgctgtcatcataaataaatttggtgtatttaatgttttaataagcaagagaattgtgatgcaactatctaaaccagccaacagccacagaatttgattttttgccaattttttttttccttttctttttggttgggtgacacagtgagaagtatttaactaaccattctctatacaattcattttctgaggcttgcagtgtacttcattggtaaagctggataaagacaataactggataaattgttttttgtaccagatattgtgatgtaatctagaaaactgtactaaagagaatattggcttagtctcctcatagttcagctcttttctatgtaaatgcccaatcagttgttcataaaaactaaaattatgaccttcatttactgtagcttgaagttacagcaaaagtgttccatcaataaactcttcaatgttttttcgatcctcataatatcacgcagcaattctctccttgagttgagataatagcagcaattaggcagcttttatttctcaaccccttttaacttttgctgtcttataaacgagcacacagcatatatatgtaaccactatagagggaatgctggtaagtgtcagaagcagtagaaaacagttagcctattcatgaattatcctttatttttcactttagccccaaaggttaaatgtgaatgtgcttggtttgcctctttctattttgactgcatgtgaaagccttggaagagttctgtagatgggcaaagaatgtaaggtttatgaaaatcaaacacacttgcatttattagtggtcactaatggcatgtaattaaagtaattacaggaaggcaagcagacaattaacttgttgaaagtgtcaacaaagggcaataacagagtttaaagttcttgtctgcgtggttcatctttaagtcccacaaatattatagagaaagaataatgctaaccagaacggtcaggctaatattagacctttatgaagcaaccctgaagtctgtacagtaaaagcaaagagccaagggcagggtgttgtggtatagcatggggtagaaggaagggagctggaaccaaaaacagccttcagaaataatggtggcttagtcagaactttagcaaggattgactgcagcagatggcaagagaataatgaacacagaagccttctttgccattgtattagtctgttctcaagctactaataaagacatacccaacattgggaaattttataatgaaaaaaaggtttaatggactcacagttccacatggctggggagtccttatagtcatgacagaagacgaaggaggggcaaaggcacatcttacatggaggcaggcaagagagagtgtgcagaggaactaccctttataaaaccattggatctcatgagacttatttattcactctcccgagaacagcatgtgaaatcccccaccaccccatgattcaattgcctccaacctggtccctccaatgacacatagggattatgggagctacaattcaagatgagatttgggtggggacacagccaaaccatatcagccatcattctatgcatccaaagtgtaaaccacattcttcatccttgcttggtcttggtcaacagttacttcatacatatataatttttttattaccaagtgggttatatgctcctgggggacaaaaatgtccatttttgaaatcttccatgtcttctgccttgctcggtttgaagcacagcatcagttgttgggtaggagcctccctaattgcccatccaggatctccatcctcaacctgtttctctatgctaagttcagtaagaggcaggcttgatgctaaatactaggaaccttatttcagttttgaggttgactttttctgaaggctagacccagtcactgatacataagaacactgctagtaatactaataaatgtataagcaccaattatcttttatatactacctactttattatctcatcaggacaactttatgaggttgtcttcaagagggtggaggcaatcccatttgtattatgtctatgtaaagtaagttggagttttagagtagtgacttggaaaccaaccctttgggaagacttaattggaatatcttttcttgataatggagtgattataatattctaggactaggggccatttgctatcaaaggaatgaggttataaaaagagatgccacttccctaacctctccccaaatgaaagcacacatctacagacaaatgtaagtggtttgcaatttcattaattccatactgcaccatttcttaaattcactattttcttatcattctttttttttttttttttttctgagacagagtctcactctgtcacccaggctggagtgcagtgacgtaatcatagttcaccgcagccttgacctggactcgagcaatcctcccacctcagccttctgagtagctggaaccacagcacagcacctgattaatttttttttttttggtagatatggggtcccattttgttgcctagcctagtcttgaacccctgtgctcaagtgatccacccaccctagtttcccaaagtgctaggattacaggcactagccaccacacctggccctattttcttatcattcttattgcacttcctgtgttctttttatttctcacctgcatgaaagtaataacttccagaacaacttccccaattttatctcttctatctccagattattttagggactttagctaatgggtatctcctatctaatgggtaactctaatcataatactgtcccacccagaaaccttcaatggttctccatggtcgacatgacaaagtcgaataacctcaccctgacagtcaagattacccacaagcaaggcccaacttgtctgttgaaactgattccccattattctccttcagaccctctacatttcaatttcaataatactcttcatgaggcctctgcattcgtcagcttccccacctttattccttggcttatgttatcccaaatatttgttttcacaccaaaattctgcctttatttcaagatctacctcacatgtcacattaatgacacacccttacctcatccactcccctccacaccctgcttctgccactgaactgctaaggttcttatctgaaccattttagcttgtgtttatttattcttagacccatctcatcagtaatactacaacatttttgagaagacagagtcatcttaattctctttgtatccttgtaacaaaaccataataacataaacatagttcctccaaccctgttgtctttcttcccctggtgaactcgtatttaaatctgaaaacctattgtggatatcacctcttccagaaagcccttcttaagacctcaggctgggttatgtgcacctttgtgttttcattgccctttgatcatactttcatcttagatctataccattatagtcaaattatataattataaggctgcctccactattagattaaaagcatcccccaaggaattatctagcattaaattccccgagtcttgaatgatggctgtaattttgtaggtgctcagtacattctgaatggctctgtaagggctcagatccatgacagctttcttggtagtgttggagagggtgtctccagtagatgaaggcagcttagataagatttagagagacctttttgaggtgagcagccacaaactctcccagttgcagggttctaaaactatactcagctttggctgtgtcatcttgaactccacagctgcccccatttatagctgcagagtagctctgtacttaagtgcatgaagagaaaagtatctttggtagatttcaaaagagttaggatggatttgagaaagtagcaaacttttaaaactcttatgcttttttagacacctgaaccccagttatgtgcagtgggatatttctcatggttctcctcaaaccgaccttgactgagtgttcctaagaattcaagattgatggatacaagactgttttaggtcacaaccattgcaatttccagacatctggccttgaagtgaggccactgacagtcccatcacctccaactcacaagtccattgagctctattactgagtataactgcagtgctctgaacaggaggggaagattgttctgccttagattgtaatcagcatggactatttccttttatgtgctaaatcctgactctactgctggggaggagcataaatgcatgtcatgtataattcagccttacctgtttaagatacagctctatatttgtatacaaaattatgttaagactgaacataggattcctgaggctggatagagtggaactgtgtctcaccaggtctggttaattacagaaagcctcctggaagttattttccgagagatgagagaagtatttgaccaggaaaaggatagctatttcaggtacagcatgcaacctcatgtaacgagagttggacagagttgagcaaggcatgcaaggaaaacagtcagattctttggctagagcaaggattctgagtggggaaaacaaatgattaagtctctaaggatggggaaggaaggtcagtaattgatctctctagaatttagattaaagatatattttgacataatgacaacagggaaacattataaattatgtgtgggagagaagcatgattaaaatatttttgaggaagatttttaaaaatcttttatattaaagatagtaaagaggaatgaactaaaacttggacatcatgaaggggtttgctacattaaatgtatgagctgatgaggcattaatctgaggatgacatgccatcattacctgtcccatgacatacatccctattcaaatgcagaatgcttttggagtggcaccggaatccttctcaacacagtcctctgggtaccctttactgatcaatttcagtaggcaagcctcatgatacctaaatgctgtccgtggtttagagaaatgatacaacaagggccattatgtaccagtcacgtgcaggatatgtattaacattaataaaatggcattcataggataccattaatattagtgttaatattagttagcatgaataggatgacatggacatagggtatgaggaaaaatgatgagtaggaaatgagtgaaacgtagaaagctaagcgactacaaagagttgttccaagaatgtaatagaaaaatgtgggaggatttcttgttttgataaaaaacaagtgagaagttatttattaatccattagatctatgttaatgggaacatattaactagatagaaatggcttagagagaggataaaatattaaggttgataactattatttcaacactttcaataagtgtatattgagaaattactctgtattcggcatatgtttggcagcttggaatatatcagtgaaaaaagtagatatagatacttgctcttgttggtgcgtgaattctaacaatgggaaagacaaacaatgaacaaatgatataacaaataatcaatagtttattagaagttgataagtacagtaaaagttagaaaatgtataatagaataaggattattaggaatttgggggcatggagggaatttggagtcattcatttataaatcttcaccatttgacctactgtcagaatatttgctggaaaacctcatacaacttgaaaatatttataactaattttctcctctctaatcataaagactcactagccatagacccttcagactgcaaaggtatgtgctacggttttttaggagaccagagactgatcaacttgattcacatactgaccttgtcaccttccaggaaaggaaaatttaggtagtggttgatgaggacagaacatttggctcattggagtctccatgtttctttcatggataaatttatgaaatttgtggctgctcattttctttattcatccaaaagatgaagagagcatcttgcctggttttgcctactcaggacaccagagtcttaactgtaatagtcaggtttatagtccattcaaatttctatcaattacagtaccaggatgtgatttttaactcaggatgttttaaaaatcatagaaggatttgttgaaggtttaaacctactctctggaatgagagaactatatgaattttagtattcagttaccatggggactatatttactatagaacaaccataaatatcagtcagcagagttcaattttccatcttcatgcctatctaagtaaggatctgttaaaaatctcttcattttcatggccaaggaatattggctatgctatctcagtctcaactcttcccctctcttattgtttctgtttcttggagcttctttggtttgctgaaaatgccctgcttcgtttctttcataccagttgtgggtttctgatttcagggcccttgttgatacattcttggtcttcctgtgtgcaaaaatcttaaagagcacttcatgttgaacctttgcagagatatttgcttatctcaccaaactgcaggttgcctgctttacttgttagcctcagaagtgtcttggccctgcaactcttcccacacaggagggctcccttctctctgttccttttggcacaatcaacattttctctgcattttgtagcattctaagcatactgtggcagcaggaagggtattttcagtctctttttggcagtaggagttatcttctgcctggcaccaagctgaaaacattctccatcgtgcagtactttgacattatctcagcaggaacagtgcggaggtacttcctgtgttgcaccattaaatatccctgcctcaccaacagccatttagggacacttcctgtgtagcattattaaaattcctgtgccagcagtagcaaggcaaggctatttctgtggtactttcgaaacacctcctatgtaacatcacaaagaggattagcgcaggttatggttttgattaaacattttgtttcagaggccacacagcaacttagaatcctattgtttattttatttccaatattgttggagttcttcacaagtatataagatattattaccagttagttcatgaatttaatattttatcccctaatcagagtcactcaagccatgaagatccaggcaggtaaatggaatcccatcagatttaaggcctgaagtaacctctgaatttataataacattcaagaaggaggcaaggcctacactatgtatatcctgttttcaattctgtttctcattccttaacaataaataaaaatacagcctaaattttatcactctcatgagaatagtcattttaaagagaagtttcaaattgtacagttgtggggattggagaagaaaatgaatgccatgtgatgtcctgtgggataaatcccaattctagttgattgatttgaaaggttgttttttaagccttttccatttatttgtcaagggttacataaggatgtctatagcacagcacactggacaaatacatcttaaaataatgtaatgatttatgaatacttacgaatctttagagaacacttcaaattggcatttatgtgtatgtggcttttatgctacaggagattcaccaatttcttaatgatataaatgccatatttgtgtcactatgactaaacgaattattatacatgtggtcaaaatctgagtcattatgacctgcaaggcaggcacaaaagagataaatatttataggtccatattaaagtaatggtcacattgaatgaaaccaactaatatagttttggtcacatctgtgtttctcaggatatctaaacatggtttattttttgagaagtagttaatatttcagaagacagaataaacacaaaatgaccacaattagatagaaacataactgacacccacccccattcaaaaaaaaatgaagatcaccaggaacaggcacataataaaatattttgcagagagagtgaaatagtctggtttaatcgcaaatgaatatataccaaagagagtcatacaatacttaagccaaagacagttatggcaggctccattatattatatatccagctttctagaatgatgtcattaaattgagttagcttgaccactgtccagaactgatgacacattgcaagaaaaatagcagaaagcccaagaaagctagcctgtaactctcacaagagtggcagataggcatagcaccgagccacagtgctatggctgtctgtgccatatttcatgtagccaagagatgtggcaccactctctacagtgcacccaactttgtgagcactttcattagccactgttaatatgaggaaaataatattatttttcaaaaggagccagaaagattgagtccacagagctaataacattgcttattttaagtccacaatattagactgtgtttgtgtagacaatgaaaggacaagatgtccagaaaaccactccgtagtaaactaagctagggcaatagggccaggtatgagagtgtggttaggagaagtatctcaagtgtctaataaagccaaagtctgctaacgtccatagtcatggctactgggaaagtgggattgtggatattttgtgaccagacataagaactcatttttagttaaagcattttaaaaaagtatacaaggcagagttgcaaacaatctcagcctatgaaaaggacagctgcagtcaatgttcccactaatattttccatccgtgtactgagtgaatttgtaatgtgcaactcatgtcaagaaaataaacagatgtgcaccacaagcggaacaacaatgaaagaacttacatagatttttattaagattgaacttttgatgttgattccactggtaagagagcactgtaggcaaaggtcttgtatttataaagttatctcctattgaggaagatgaagatgtcaatactccccaacagaatgctttgagctctttctagtagatctgtgccaactctgaaacaccctctcacccattttcattatgagctcaagtgcaaggttgccagacagctggacgtgcactacaatgaagaaaacagacctaccaaagaactacatctgttatcttggcctcatatgcaccctgctgaaaccagcttttccacctggccaaagacatgggagagcatactcatatgttaatgaattgttgaccttaggaaagtctttgtaactgagtacgtacatttttataggagagaagaatttaaactaaggatttaattgatgacacaggtgctaaatctgtactaccattgactacagatgtaatgcatggtttaaaaatttcttcataactttcccccatacatgcttaccacctttattagccctgccattccctgagcatcctacagtcaaggcatatgtactgtttaactttcccagaacacactgttatttttaaataattatttcttgggcaactactgtgtaacaggcatagtctctgtttatactgtcgtctttgccctcaagtctagtgaggcaaggcaatattaaataaacaaatatgcaaatgaatatttaaatcaaagtgtgattttttacacaaggaacacattaatacattcttttcgtaaagacaatcaaacaatatacagatacatagagtgaaagggaaacagcctagattgaccaagactttcagttgcaagtgacattgtgcaagagatgtgtactgtaatcggcatccccataagaaccttagagaatgagggaagaatgatcccctcaaggaaactgcaggaaatgctaattgctaatcaagtagttctatcgatgcccctccctccaacccctcttcttctaagaaactcaccagcataaaaattcgtgtctttccaagcctttgtccacacatttataatacatgtacatgtatacatgtatagttacatctgtacatatgtattcagatatgtgtgtctacatgtatgagactgtgtatgcatatgcatatctatacatgtatgtgtatggcttcctttttaaaaatcataagttggattacactatatgtattgctagtttcctttatttaacaacactatatgtcacttttctatgtcagtagatatggatctatttcattcttttgatggctgaatcatttgtcatagtaaagatgtatgacactctacctaattctctccctatttatagatatttagcttgtctctaattttaggttacagtgcttcactgaccatccttacagatgcttctgtatgcacacatgcaagtatttccctggtgttgttatctacatgttatctagtctgtgttgcttatgaaggttctttcaacttcaatattataaaatatattaccttatttatttttcttttatatatgcagctctttccttcatctgggttttggtgagtggttagaggcaagaatctattatctgtaccaccaaattgccagtcaacatcatttattgaagaactgtcttttcctggctgaattgaggcccacctccctcacacactaaatctctgatatacatgcacctgtttctagcctttctattctgtcctgttcatctgtttgtacattcctgaatcagtcatactgttttttacatttttgtttctgtcatcggtatttttgttctgattatactggtagtatcttctttgcacatggttgaaagggtgcagaaataccagaggaaacatgaaaaaccctttctttctctcattacttgcctgcccttctcccagctgtcaacagttgggagatattattctggtgtcctttttatctgtttccatatgtacatgaagctttatagacatgtctggttttagtctttttattaatatatgtagagttatgctatacatgtgattttcaacttgctttttgtcacttaacactcttggagatcttttcatatcaaagcatacagttagatctcatttttgaaaaaaaaaactgcatgagattccatagtacatagtatgtactatgagatatttactcctctttttctgaaaaatactgttttaattcatggagctttataatcttcaaacatgtagggcaatagtaggatgacttttgatttgagaatcagaagagaaagcctgagacttgaggaagggagggagttagctagaggaggagtgggaggaagagcatctgtggcagaggaaacaatgtgcaaagacactgagtgtgaatgagcagggcctggaagaaattctcaaagatgcctttgtgactagagtgtagtaaaggaagagagggagacagtgagataaggactgagaaatagacaagggtcacactcttagggtcctgtcgattgtttaaaggaattcatattttaccctaaaacggtgaagagtagagagtaattgaagacttaagcatggaagtgatattctgtagtgggttgaactgtgggtcccaagaagatatgtccaaatcctaatcccttctgcaagggaatatgagcttatttggggggaaaaacaaggtcttcacaggaaaaatcaagtgaagaatcccaagatgagataatccaggattacccaggtgggccctaaatccaatgagaagtgtccttataaatagaggagacagccagagaagaaggcgttcagagacacaggcagagactggagtgacgctgccacagccaaggaacacttggagccgccagaagctggaagggacaaggacaaatcctctctggagtctttggagggggcaccgccctgccaacaccttgatgtcagatttctggtttccacaactctgagagaataaatttctgttgttttaggccaccaagtttgtggtgttcagttacagcagcccaaataaactaatagacattttttccttttctttcttattcactcactcagatatttgacgaatgtctatggaagtactcactatgtgtcaaaactattcaaaatcttggggtggatacagcagtgactcaggcacacatgaaaaatccctatgcgtttgtcagctgtgtccctccacaatgcatctcctctcaggtgacaccttgggggttgcattcctacagtacctcactttcctttactcataccaattgcatgtcaagtttgattctacttgcacattttttttttttgagacggagtcttgctctcttgcccaggctggagtgcagtggcgcgatcttggctcgctgcaacctccgcctcccaggttcaagcgattctcctgcctcagcctcccgagtagctgggattacaggtgcctgccaccactcccagctgatttttgtatttttagtagagatagggtttcatcacgttggccaggctggtctcaaactcctgacctcaagtgatcttcctgcttcggcctcccaaagtgctgggattacagatgtgagccaccactctcggctgcacagtttttcattatggtttctcttatcacttagccttggcatatgttaataacatttctttcttgcagttgttaagtagtagcttagatattgcatctgcttctgtgaaggttttccagttgtgctcagtacattttttgctgtctgtgtcacagtagatatcatactattttgtaatcacttacctgtttgttattctccttagactttcagttccttgggggaaaggactattttgttttcatttttgcatctccaggacctggagtaacccatacacatagtgagtgctcagtatgtatttaacttatttgatttataaaattataacataaaagacatttttgataagctggactttattaagttaaaaacttttattccctaaaagacactttgaagaaattacatccaggcatggtggctcacacctgtaatcccagcactttgggaggccgaggcaggcagatcacaaggtcaggagttcaagaccagcctggccaatatggtgagaccctgtctctactaaaaaatataaaaattagcccagcatggtggcatgcgcctgtagttccagctactcgggagactgaggcaggagaatcactggaacccaggaggtggaggttgcagtgagcctagattgcgccactgcactccagcctgggcaacagagtaaggctctgtctcaaataataataataatacaaatagaagctacaaactagcgcagcaatatttgtaaacatacagctgacaaaagattagtattcagaatttataaaatattccaccaagcaaataaggaacacacaaatgctacaaataaaaaatgaatgaaaaaactccatagccattttagaaaacagtacatatatttgattgatacatatatgaaaatatgctccatctaattaatagtcagagaaatgcaaatctgcaatacaattttacttcctttcaactgggagaaaaatgtgagaaactcaacagggtaagtgctggagaagatgtgtttcagtgagttttcattcacattgctagtgggaatgtaaactgaagcaatcactttggaaagaatttgggattatctcataaagttcaacattcacataccctatgatctaaaaattacacatatacacgtacgtacatataagtagaaacacttgcactgatataccatgcagacatctatacttttattcttcagcagtaaaataaaaaaagttttctaattttcctgctctttgcccacccacctcaaataaccctacaactagaaacaaccaagatgataagacactttgacaagagactgtaaaaataacttgtgatatattatcacagtggaatattatacagcaatgataacacataaactagtattacagacaatgcagatgactcttagtaacataatgtgcaatgagaaaaacaagtgtcagaggactacatagtttgatactgtcatcacaaagttcaaaaataggcaaaaataagcaatacattttttatgcaaatatatgtggcttcaaaacaatattctttaaaaaataagggaactataaatgcaaaagtagagatattgcttacttcttaggggatggtaaggaatggcaaggtgctcattaatgtaagtgaatggtagtgttttagttcttggattggtggtgggtttgtattatatttttaaatggaaataaggtaaaagagagctatgcatataacaataatatcatacaaatgaagactaagactgatctaattaagtcaattaacttgagaatataaatatttcaaaatgagcttggttagtagttttgccaaagaaatctcattctatgtaattcatcttctctttggtcagtgctctaattgttcctcatggtttgtgcctgcctagagcagaaggcagataaaaaaagtaaaccccagtggttgaattaattaataaactcacaaatttggcttctactcctttctattgtagctagttattagctttgtaaaatggtgggtcttaatcatgaatgctgggtatgaggcttcagagttttagatcctgctgtgaaattcaagatgtagaaattcaagaagatggtaacttcccaattagtggttatgatagaaataaaggcagattatcttaatgtaagaaaacacaggagaaatcttggccataaagtataagagttccctaattacaaatgttcagttcaaatgctgtgacatgaagttaaacaaagtgaaagataaaagtccaaattagactgaaaaatagataaatctaaattagactgaaattgagatagagaaaaagaacagagatgttttccatactgcagagtcatattatggaaatatagagttgtctctacaattcctggcaaagggagcaaaactgaaaatgctattaatactttaaaagttctctctcactccctatccacaagggaaggaagtacacatttctgaggcaaatgtacaaattgcttgtcccagctctttgaacatttgatctttagccaggaccttaaaatgtgtatatttattacacagcactgcctatatttttatacctttccaagcaatatataaaggtgttttgaaaaactgcttgagaacctgaatatggctttgtttcttttaagcatttagaacactctggaaataccttaagtgaattcttaaaattgtacttaggatgatatttggaatgccatattctgtatctacatatgtttttataggtagctaacaatgtctgggtactaggggttttatggaggaagcattggcataactataaccgctgccccttaaatggaagcagcacagtattacaataaccttacaatgaatgttaggagaaagagtcaacattttgcatatatttttgatagttgtctgagtcccaactttgacttaaatattgtcaagtaagactcttttgaagagtctttggggtattaaattcttccatatccgttaccaaggtcctctgagcaggacagcaggagaaacaagaaaaaaaactaagagcttactcctgcatccaacccaccatgctaagctggaatgaaagacacagatttcaaatcaaaaagcttgtcagcagaacaggaattgagccattagagtaagaattgaccacaacaattagattctccatatgtccgctaaaggtccccataggaggttctcatccctcatgcttgagatactgtaacaggaatggtgggcacatcagcataaggcacaggtgaacaacagcccattcttggagtttgatattcacatagggaaaactgtggcccttggaaacacacctctgtggagaaacacactatgtgaaattttgttagcaactctcacctctcagtcttttcattttgtggtctttttgttggcaagtaaaagcatcatcagggtcaatgtggaggcttctctttagaattgaaaacttgctctatcacaatatcttagctagaaaggcactttacaatatatctgaagcagttaccaatgctgggcattggaagaagattagccacaacccagcattcacagacacccttgacggagaatcagtcagtacactgaacagtaatttacataaaagtcatacatatgtatgtgagctcacaattacaccacctaacagttttgagtgttttctatttgtcaagaactctgttacctgtttcatgtgtattatttcacttattcgttatatttttgggaggtaaaattactacaatctcttgtatagaggtgaggaaactgaagctaagagaaacaaagtaatttatccaagactgattccaggtcagcctcactccataattcatactcttgatcattttgctattctgcctatcctaggctttctgttggaaagtgcattggagttctttgtaaaattcatggccaaactgttgggaatggaaggtaatttgcaaaacaaattgaataaaatctgcagtggacaattcaagtcctaaatttatgcaacatgaaaacttcaacaaggcaaagaaagtcagccagaatgatattatgcatatgtgtcacattttcttcaaagtcggttccattccaaaaagcaaagaagcttcccacttggaagtgtattgagtatccaagtgcttgctggttcacgcctgtctacagtcaacagtgtgtactaccagttattactgtggcctaaacatcatcttggtgtcaccctctctattattcacaaatgtccatcaaacagtaaatactgggaattactataaacagcaacggtgcagttttgatggctatcgctttctatattctagaaatgtaatcttatacactaccctaaaattggatatagcatatgaactctttcaatcatgcagaaagtgaaaatgtgtgttatacagatcactgctgtctgtaaaacagctgatgaagaatcacaaaaggagttctagatgtcctaaagaaatttctaagcagcattaaaatctcaagtagagaacattccaaaggtttttctgtactgaaattcaggctttaaaagttttcccattaagttttatgcatcttgaacataatttgttaatatataattttgggaattttgaatatatatgaccagtgaatagttattataatgtatttagcatgatgaacagttgctgaaggatttggcagcatattttattataattcaaaatacttgaattcttttctcttatttttcttctaacctctaaagtacatttaaaaatctggagagtgggatggagatatatatatatatatatatatatatatatatatatatatatatatataatctccagatacacacacacacacacacacacacacacacgctaattcatgaatcattctgcacatgattgcaagccattgttttgattgctagcatttatatttgcatttaatcacaaacacagttagttgttggaagagaaatgcagttttttgtggaggatgcatttggctttggggttttgtagtaatgtttaactattcccacgctttgattaccataccagtatctcaagggaagaaaatacaatggacagtcaataaaaatactgaatatttaaaaggtcaactccatgagggactaagtttctgatgcctcaccattttcttgttaaaaatctgctttgaataggaaaagaaaaaactggaagtcgttcttatggttgtgcatgattaaagaaactctataaataataatttgtgcaactgtgtattcagagaaggaatgtagctttcctttgctatattttttttttagaaaagaaagaaaacttttctgattttccatttgttaataagttctattctcccttaaagcttatgttatgccttattgtaaatctagactcatggagctgattcaactttgtactgatgccaaagaacttactttttaaactgaggttgtggagtagcaggggttagctattgcatgtagttcagaggtaaatttccttcctttcccctaatagttccattactatttatgttaaaactcctgttattaggtcttgtttatgaatccatgaatcgcaaatgttgtagaatttgggaaacattaaaaaaagagaaggaacattctaaaacttctagtccgaatgtgtgtttatgtgtggggtggtactttcaactttcctttattctgtggaactgtcttctagcctggtttggcatatcattctcttcataaatattttcacaaataaaacaaatattaagttatttttaattctgagtaactgaaacaaaattacagaagtacagaaataatgacacattttaaaatttgaattctaaatttagtcttataagtacccaattctcataaatttccagagtatttaaaaggtgcccttcattgaacatacaagtatttttcagctttgtagagtttaaagatcttcctaatactcttaaaaggttaatcacatttaatgaggttgttaaactaatcaatatttcttttatagacacacttttcacctggtctctgaaaggaaattctctaagggagacagaaacaatattcactagaaatagagtataacaaaacactagggactcaccttcattttttccattaaacttcttttttaggtttctgattactgatgctaatatatactaatggaacactggagctaatttatatactttcagatccaatattttctctagctggtcaaagactaagtagtgcagtgattttccatgacttccgttattagacctgaaccatattttgttgtctctgaaagtgctggtgctatttaagcaggggccattcaaccactgactcacagaatggaggacgtattttctgaaagtatttacccttggtgtgttcataacatcttctgcattacctcattcaagatccaccaacactttcccgtgtcctcagtgacttcagaacctaatgcttagttacccactctactgtaagctcaccctcctccctacatttaatacatactcctgagtacatactcctgttttcagctccacaagcttatgttttcattctacctccgataccaatgactcagtcacctttgatctcatcatcattaaaatggccctaattcacctctgataacagcgtcacctaaatctgatgttgagaaatgttgagaaaatctcaacattttctccagtacttgactgttcattttcccggtttgttatcttttcccatgtttttttctgatttcttgtttgcctggattctcttttaagaatttgcaacattctagtgatgatgattcaaggatgtctcacctacttgaccttcactcctctcatctagctgatctccagttccaaaaatttttggatgcattgacgtctgagccaccaaaaaccacttgagaaagccttcaaaaatgaacactactttttgctgcctctcctctcttggaccagcacagttgcactgcagtccttcaatgcaccactagtttgtgccagccaaaatctcaactatgattttaaatactccattgtctcacaataccagtctgagacctttcttcactctctcaatagttgtgctcatgtctgccacaatcctataattttctgtgttctgtcttgtgaggtatcattcttttgtcatctcttcctttctgcctgtgagaaagaaacattcctctttgttgccagagtttattcttttgtctctgtgttcgattctatttcttgctgcttctgccagcctcttcctccataaaccacttttactttggcattttccatataatttttagactgttgtcctcaacaccaaacaaaaaggaaaaacaacaagtttttttttttcctcaagcttttctcttctccaagctgatgccttatttctttgttccttcccttcagtgagaaacaaaatctatacccttggctccccttcagtcatcttttctattaagtaatcatttgctttgacttcatcacattaacactgctatttagtttcttttgaaattcctactttcctagttctcttctttgactgcctctactcccatagatatgtactctctgcctcagtagattaatcaattctgttgatggcagacatctccctagtagattcttaaaaatatttgtatgcctcagtctccttacacagctccagatttccttcccgatgcaccttggccaattctgtaacagccttcctggcatcttgaccaacatgtgtaaaatccccaaatccaccttctgctataactagtatcttctaattctgtaaactgtagtaccatactatcattcagctaccactgaaggcttggaatctttctactgtttcatctccctttctcttgcttccctctttggccttctttggcttctagtcagtttccagtaggttctacttctgcagagttaccttcatctgtctaatgcaaacactacatcaggacctcagcatttcccataggaaccattacacaataaacttcttcccttattttctatctctttgtatactgtggtcagactattctcttaaagcatggttccaataccacgaaaacacattgattccctgctgcttttaaaactaagttcacactctaaaatgtgacaatcattgttttcagactttgatccattctgttttaacaaagctactgcctacaacaccactttaagatcatgcatttctataacaataaaatgagtgacctgattataacctggatttccacaatgtggttatcattttaggttttcacttagcaatggggacagtagaacttataccttattcctccttcctattctaaggattgagagttatgaaccagcctgaagcaaaaccgcaaaatagggaaatttggttttggtacctcttatcccctttcttgcatctctcaccaatcttgataaatacatcaaattatcaaattcttgtctcaaggctactaggggagatatatttgaatgggaaagagaggtgctttctcaactcttgtttagaatgaggaatttcaggagtccacatccttctggtttatagatatgtgtattatttaggagataatattgtgaattaatgccaagaaaagtgcctgcctctgttttcataaattatgcaaatgcatatattttcaccaaatttgaaggatatgtttatcaaggaccgattcaaaatatatgttataaattttgtgaaagatttaccttggaggggcgctggagaacatctcaaagggattgatgtttttctcctaaaaagctacctgaggcacaagaggcccgcatgactgcagatcaggagaatcgtgagaaagacagaaatgacagtggcctcaaatatgagctacaaattaacagtctcagggtagatattccaggtagatttctagtagccctgctcctgacattgtcaactatttataccatgttctgtagtatgtaacagcaaactttatttattgaatgatggttattctcttaagtaacccagtggagaccagcaattaataactgtataaagtattgttgttgccactttttgtgcacttgctgtgcaccttgctgatcactctctatgcatcattttaatttagcccttaaatgatttcatgagattttatatattggtactttcagacgaggagactgaaggtcatgaattctacgaaacttgttaaaggttgcacatctagtgaatggtgggatggagaacaagactgaggtctaagaccaaagatattttctcctctctagtcctctaatccgtcctcagaaatagtctttctatcctggcttctacgcccttcccaggctcatttaaccaacctcccctttgccctctccctcattctctgcataacttccatggcttacccgcaaagccagatgagaccagccccaagatttatgttaaacatttatgttatttgtatcaaaaattaattatggatctattaattcataacttcataaaattataactcatggcaaacatttgaataggattactaatgtcatgatattttgtatttaaatatcttgctttataaagtatgatgactaggtcatgctttcagaacagacttaaggtaattctaatactttcagttgtgtgattttaagtcacatgttatttctcagagttatattccttatgaaacttggggttcaactttacctattgcttatagtttcttagatggaaacaaaaggttctttaaatgaaagataaagctatatctggagggcttgaaattgcagttctaaagcttttgcaggtaaatcttgggttgatagcctgttatttctcccccatagaacaccaggctcacagatggtggtgtgactgattgtctcagtgggtcaagctttttttttgttttaaacttcagtgcttaaaggcaataccagtactcctacccatggaggttcttgacattatcatggctacttgaaggatagttgctaacactctggctcttaatccctcaatgataagctcaaacactcccatctctgcagcaaaaatctctttttgacactgcaatactactagactttctagtttcttgagaagtcattttcatagccagtttcatagccagtcagctgggatgctagtagaatgaccctcctgatgaaatataagacttttactggttagaagccactttgcccttgagaaatctctgtttaacagacacttcctgggtcacacagacctaattacactctgatggtgcactttcattctttctgtagctattcaacaaatgccaccaaatgtaaatggagctaaattataaatgggaaaaaaaatataaagataccaacatctgctgacaatttctaaattgtatatttctgtggccaataattgtgactttattaaatatatttatataatttaaaataattaagaccatagtataatcaatgcatatgaatttattccatacttttatcaaatgataagattgaaatcattttatataaatttaataaaaacagacatcatacaaattttcttctccactgtctttaaaataccctactagccaggattatattttactcatttagcagttattagaattgcttgaaaaattttgttagaggccagcccaggtccctcttacagaggttctgacatcagcagtgtgatgtgggacccaggtagttgtagatccatactttgataatttgtcacttctgctcttctaaatctatttcaaaggctttcctttaacaactaatagataaaaaaatagtttgcctgatctctttgtttaacagagtcaattggttcagatttacattcagaaaggtacatttgcctatgcttacatatagatattctatagaggagagagtgtcttagagtgttgttaaactttccttttgactttactttgcaaaagccaacacatatgcctcggtttcttcacctgtgaaacaggtatgctattttgtataaataattctggttatctcagttgtataattgcttccaagcagtagagggaagtattgctctgggtatttctagaaaaggcaacagaaagaagtgaaggtaattctgacccctgggcaaatggggatcccagaaaaaaatattttctcctcatcggttcaaacaattttttgagtcctttcatttgcattagaaatgtagctttcatggttccactcctgagattaaacagggacctttctaagtgctagagagacatatcactgtctggagttattttcagaggtggaattttcccttcccatcaagtttattgctagcttctcacttcccttcctcgtctaatgagttatttctttctctgcttctttagcaaagaaaatgaaacaaattatacataggaaaatacataaggacacatcaggggtttgccatatagcaaaaacctgcaatggacttgggggaaagatcctccatgggaccaaaatagattttctccagtaccttgtaaatgggacatcgttctgtcttcttactttacaaggtaagatttaaattttagacttaaggtctagttcagaaactaggtctatatctgcccttgcttaatatgtgggatcaagttccccacttcctctcatttaggaagatgaggatgtcagcagagggtttctggaaactgttagcaacagtaacaagtgagctggtcatccatggccaaggagctgaatatgagttctttaataaaccattatttgatgcagcaaaagaaattaaattacatcagttaattgacaaagcaattagcaagctgtccataaaccccaaaatagccaaacattataaattttggtaccacctactggctggaggagatttttggttttgttttgttttgttttgttttactataagcttcatttacatcattatttctccagcaacaatcaaacctctggcctgtagatctttccatctttgcattgcctccttggttatcaattattcaggttcagagaccagaaggtaattttggcttcaactagctgaactcaagagtagtataaggaaaatatctcctgatgtttcctcagtatttagcatccacgctaacaacaatttcagtatttatccagagacagatgaaattatgagcctagcaaatctgtgccgtacacatatttcagcagtgaccataaaaaaaatcacacttaatcatattcggctctgttcccaaaatacattttttgacagaagacaaattagatcgtcgcactgcatggtgatgggacccatctctctacaagggtttgattaaatgcctttgacccgtgtcattgaccaagaaaggagagagagaacataaataaattcttttgacttaaaagtacactacagaaagtgggctcctctgggaatctggcacattcagctgcatggtctctgttgttttgttttggtcctgccccctaaatgaaagggcttcctgggatcaggccaccacatggaaagaaagaaagatgttacgctcccacctccggcctgaagtgcaaatggaaaaaacattgatatggcttgaaaacactaaaggctatacggtaattggtaaaatctgcgacccaagccatgtgaaaatgacaagggcatgtcatatcatctttgaaagatggctcccttctattccaatgaatggaatgtcttttgtagcaaattttcaaactcatttagatcataaaaatgtccactgggacatgaaatgtctcttgactctacctccatgtattaatactcttcctgccttcaaacattcctgagtcctgtgacccaaactattaggttgaagaaaaagcatttgatattctcatcaaacatgttctcactgtgatgtctccataaaagacaagccaaataagaatgaaaaacagggtaaactgtgatcttccctctcctacaaccaatctcatttttgtttaaagcctggtctcattttgtgttttcattttgacacttgatatgaaatatcagtaaatataagtgacaatattttttgccttgagtggtgtccactttattaactatacactatcttatacttgcttttttcaagtaatacaatacaaaaatctgtcaaccaaatatttgaaactcaaattgtatgttagatgtcctagggaaacttgacctttagtgatatattgtgatgaattctgagataaaattccaatatccaatatttttctgctgatatatctatttaagaaaaaaaatagctttctgtattctctttgaagtaatatacacctgagtcaccattcatcatattgaatcttcattccaagtgtaaactcttcttttgtcagaaagaaaaacaaagtgagaacataccaaatcctggtaaacctcttgatcatagaaattgtgaggttatctgtgtggtgaagtcaaaagaaaggctggtgtattccgactgatttgtccttaaccagctagatgactatgggctggtcgcagttccatagctgtaaaatgggactggtaagtaatacagagtgtgaagaaattttgtgagttctttcatttccatttacattagtaatgtagctttcatggttccaccatgtagatatggcataaacattaatgtcacttttgggggaaacatcagtatctttgcttgtgtctgtgcacatgcaggggtgctctctctctctctgtcacacacacacacacacacacacacacattcacacaaatccctgtatgtgacagctcaaggcctaggctgcgccacctctgcttttggataagtcttcttttccttccatttcttcccacactcggaagtgaaccaaacatcatttgggataatttaaagtcttagtgatgtaaccaaaaggccgagagagagactctaatctttgtgtttactgccacttaacctttgtcacatcccactcccctgactaagaacaggccatttttctagaaaggacagctccagtcacctcctggtaaaggagacagagaacctggtaggaaccccgaggctcagtttccatagcaaacacattagcattggcagctggacatgaagccctctgctcctccctctgcaggctggtggcctcttcttggaagtccagagatggtacattgccaggcagcatcagccgggtttgccttttcaccaaagggtttgaaataggggcttcccctccatttttatcctctctgcaactgcttagcagaaccaggcctctactcccaacttctgaattcttctctgggcagaccagccagccaggactcatctgaggcttgctggctgcctctgtcctcaccacccccaccttgagtgagcagccctgagttgtccctgttgtcccacagcctaggcagccctctctcttcttcaggagagaggagttcagtgcaagcatagtgctcatccaaccccatggcgagggacagcaaggggcgtaggaagcctgcattgctctattatggttgatgctctgatagaaaagcaggagatccagggagccaataaataagacccctttgccctcctgagctgggaaacaacagggaattacagtcgtcagacagataaacatcaaaatagcagctttacttttgataaagctagagaatgtcatatgtctttgatgtgccacaaaacgggtgccttaatatgccctctaagtggaactcatcccttctaactgcacccaccacacacacaaacacacacaggcaatcatgtgagcatgcaagtgtgtcttctcagacaggcagcctggaacaaaagaggaagaggctaatttggacactcagattcttcgtctggttttaccagtcacttccccggggagtgtctgcgggaatcatctccatagtgtttctctttgtggaggagagtggaaattcccttccttccttctgtgggaaaaaagaggcatggagagtaaaggcttgtccctatcaggaaaatttgcctcattcctgtcatctgagcctggagagactcgggccacccaacaaactcacagaaaacagaattacagtggctcagtgtggctgtttgcggaagtggaggggagcaaggccaggagtaagagaggagatcaggccttccggaagttagatctgtggttttggggcccctaagatgaagggaagagaaaggaccataaatatgctcttctgtcccacctcttctagttggtcccaggcaggatgtcaggagaaatgggctctctccttgcagctctgccagcagtaagctgtatggccttcatcaggtctcccagcacttttgttcttcattgttaagcaggactgagaacttaagccttaaccacatacagggatgtttgggaccattaatgaaggatcaaaagtgacaacacttaaagtttaaagcaataggcacattctgcgaaacaactggcttagaccttccgtaaacaccaatgtcctacataaaagactgataaagaacatttggggacaatatgaacatgggctacagagtggctatgagtacagtattaatgtaacatttcctaagtgttatgattgtcattgaggttatctagctgacatccttgttcttaggacatgcatgcaaagatacttaggaggagagagtcagaatatctaattgactctaaaacggttcagcaagaataatgaaaatattacatataccacatgtgtacatttatacacacatatacaaaaagagaaaaggaaaaataaagttaatatggcaagatgctaataactggtgactcaaggcaaaggttataactggatcatccgttatcatattattcttggagctcttctgtagatttgaaattcttaaaaataacacgctgtggagagccagggagaagcactagagaggttgaggggccaatcaggaggaaaggctgatgtgtgggacgtgattgcagagatactccagtctgaaggtgtggagaagtcagggggtggaggtggtaataatgcattggaggattttgatctgctagaaactctacccgaggaacaaagtcagggcaggagagcagtgggaatctaaaggggagtgggagagcatgagaaatgtatctcacccctcttctcattgcttccccagggccaggcctctcagagagtataacccttcgctgctacaatgtgtactctggcctccagggagaaaatttcctgtgtcaaaatttaaacatcacacaaggccaattttatccctgtgcttcaaaaatgcttagcatcccaggccatctgatcttagagggcacctttaggtttgttttgccttttcctaaatccatcaagtaacgtgtcttcatgttagactttagtatcgttttgtgtctgtggtggcatcggagaaacctttgctaaatttagccttgttgctaattaggaacagaggacatgttaagcttgaggcttaaatacagaacttggcaggataccaaaatatggaatcaagtcgtcatttcaggctgggggaaaatccaagcctgaattaccttggcgactcacccagtatattgttattttagtcttcaaggcctcctaactacatgggcatttacacacacacaaacacacacacacacacacacacacacacacacagcgttatcgactgccttgctcatcccccagtgcctcattttataaataaaaggcagtgcagtggagggatagaagcagggtttaagagagtgtctatgttgactttacattggaagctatgactgtatggagtgccatacccattgagaagagatattgaccacattcttagtaacattactgcaagagttacattattcctgttgccatatttacatcactttagatccagacagcgactgcaacaacaatagctacactcatcctctaatccaagcataaagtaagtctttcaagtcaggctttaggcatctacacagctgtatctaatgctacagtgctgctagtatttaaagaaaaaaggaagcgctgcctgagctatttgtcactctagggtctctatcatttaaccaaaataacttgaaaagggtgttgttttcatctcttggagccatgtgcatttccccagggcattacagggattatggagctgtcagcctctaccctgtcttcctcctttccactgagtccaccatatttggcccaatgatgagaaaactaaatagggaaataaaacagaatggagactaaatgagaagatagaaaaatagaatacagaggagaaagaagagttccagttgttgttattgccttgatatgccttttccttccaaggcaacagctcttctgggctctcaagtgggacacccccccccacccccccgggccttatattccttggctgagaccagatgctgcctgagtcggagactggcttctggcccctactgcagaattgccattccaactgggtttctaagtgccagagccagagcaagaaaaaggcagtgcattgaaaccaggcctgccactccagtgttgttctcaggcatgcctacggaggagtatttatcataaaggaagaaaacagtaatagcccagaactgtctgtttgttcaactccaacttgaatgataccaaagattaaatcttggtttccaattgtttcatgccaaggctgttatatttaaggtccaaatatgtgcaccatatgtcatactgtagcttgacaattacctcaacaggcagtgtcagacagatggtaaacattactaccaggcatacgtacatttagaattagacatttaaataaattcaggcctatcttaagcttattaaaaggatttgggtctataaagccatttcgggcccctgcatatgctaaagtgtcttttgcatcctgaacagatttggtttggttcaagtaccttcgggctacagatggcaagtgacatgctttctctttgagccctgtacctgcaattaggccaataatggcaattaaggaaaatgtaaagagatttaaacttcagttcttaatatcataaccatgcaatactgcctatgaaatgacagaaaatcctctgcagggaacatcaccaacctctcttaaaagcccgtgaacttcagagagagagattagaaagctacaaaggtacccgcctcaggaccaagtcagattctctctggtttaaacctcaggctacggcaagcttttgacaggaatctcacaaactgcaaataaaggttagcattccatgggagaattgaaagaagaattcagatgaatgtgtttttaagatatttttccccaaaaaacgatataaaagccctctgtacactctcttcttccagggggttttggatcctgtttggcattgcaaaatgttcagtatggtttgtgataagaaactaaatgaggctggggataaggtcaagtgtagccagagccgcactccaagaggatggccccatggagtggcggatttttctgaaaaccctgtgtcctgcccacatatgtaattcactactagaattatttccctgcttagaatagtttattggctcaactttttaaaagcaatttcaatctgtgaacagtgcttgacacatcatagatactcaataatttgaaaggaaagaagtaaggaaggaagaaaggacagatgagaagaaggcataagacaaatcaggactttatttttcaaatgcaagtgtaacctcaggattgttatcccgcagggagtacacacctagtgtagtggctaactgcataaatgctgattcttggcctttctgagttcaaatactggctccatttcttacgagctttgtgatcttgtcatgtttcttgacttatctatgtcttggatttctcatctataaaacagagataataaacattcctgttgtgagaattaaataatatatttataatgcatagaacagtgcctggcactatatttctgctggtttttttttgcggggggagacagaactgaaactcagtatttttttttcaaacagagccccattagcaggtttgataccattttcctcctcttcagctccatttggtatgtccagttttattctggacacctcttgagctgagagaatcacctcatcatgggaatctggtaatgcttccacacccatacagctagcaccaggctaaatcttaacttcagggctacagtctccttcaaacagatgagtgaggaagcatttgctaaattctggtgtacctgtgtgtttgtgtgtgtgtgtgataataaaagcagaatttcaaaaccctacactgtgcccaaactgggacctttgtcctgcttactcagataaactccagaagcatatggagtggcttttggaagaacacatgtctcaattctattttggtttccccttaataaagacagcttggtctagtggcttaattatcaaaccctctagtccattctgccattgcctcctgttgtcagccccttcttggaatctatgatcaccactccccatattctctataacctaataaataatccaggctccctgccatgacattgaaggcttccaaaatattgcccccgaattatggtatccttgtatctccatacagctactttctatcccaaaacattgtggctgctttcatatctctacaccttcactcatcctgtttacttggcagtgtcctcttccagtcatttaaaataaaaagatgaaaatagctgctgaaatgctgtttattatttcaggcctatctgtcgctagtccagtggttctcaaagtattgcccctgaactaggaacatcaacatcacctaggaactagtgaggaatgcaaatgttcaggccatatccaaactgagtaacactttggaggtggagctctgccatatgtactctccaggtgattccaatgcgtgccaacatttgacaaccactgccttagcccatcatttaaaatgtattgctctcctctttggatacaaaatatttcattcttttatttgtcatggcccttccaccttagtgattattataaacatctctctctttccttctccttcataaatgcttttaagactgagattctgtagtccaagagtctccaacccctgggccatggacccataccagtccgtggcctactaggaaccaggccacacagcaggaggtgagtggcaggcaagcaggcattaccacctgagctccggcttctgtcaatcagctgtgtcattagattctcataggagcaagaatcctattgtgaactctgcatgcaagggagataggttgcaccctccttatgagaatctaatgcctgatgatctgaggtggaatagtttcatcctgaaaccatctgcccctgccccccagtttatggaaaaattgtcttctatggaactagtacctggtgccaaaaacactggggaccactgctgtaatctactgttgtctctcccaacctggcccatagtagactctcaaaagtctgtgaaattaatcttgttcaatatatatttgtggatcaccaaatatgtgccagcccccagtccttgcagagataaaggagaaatgtatcatgggatcttggtctgaaggagttttcaattcagttggaatgtcaagacttgcatatataagataattaccaaacaacataagacggccagaatgcacaggtgcagtgtgaggtgcagcagtaagtgccacaggaaatcaggaagagcagagactgtgggtgagcttcctggggctccttgtggagaagtggggcttgagctaagcatggagggcagggagtgtcagtgggcctggaagaatgatgatgcttttccttgaacgggagcagggagactcatctgtggacctcacatctccttcaacaccaccttccatatggcacttggttcttaaagggatgaataagttccataaatactttatttttatgacttagattaatgtgatattaataccttgctagaattaaccaagtacattataacctaatttatgagatgaaaatctgggtgtataataggtattcacaagtgccaccttctgaatgaatgccaacatgtaaagcttcaaatttccttcagttttcagtggtgcccatgaaaccaccttttcaattacacatgctgttgttggagctcctgctttgcaattaagtgttcatcttttttcagagcagctttggggagaattgtgaaggaggtggagttggtttggggcaattcctcatacttgttgggaattccttcagcatcagtttaatctgtgtccttgttctgtttgaagatcaccaccttggcacttcatgcagaaaaagcttcaactttccagatttatagtttgcaattttaacagtggcaagtgctcacaaatcatctaacctaattccttcatctttacagttgaaagggcagacacctagagatgtagcatgacttgaccgggattggacagttggccagcagtataacctctattggatcccacatctcctgcttctcagatcagttttcactacccccctcctgccacatgtgttaggttgctcctatatcttgacactattgtctctcccttccctcctccatagagttggcctgtaatatatcccttcagaaacttacatgtgactcattaagacaataatggtgatttgtgttaaaatgaatacctaataggtttccaagataacagtttttttggaggggtagagaggaaatcaagggagctgagtaggattccaattaatcctaaaatttgactttaatggtgaggagtctaggatctctggcagatgggaggaggagatcattgaaagcaagaagggcttttggcacccctcaggccacacatgtgctgtgtgagccattgcagtctgaaatgtgcactgcatcgtttaggattttgccacctctcctgggaaagcagcttgcctgacctcggtgagaaaaagttttagtcttaatgactgttacattatttaaataccaagtgtttgaggttaggcatattgcctcacttttttcctttgaatctgaccctgattttaggttgtaattaaagtttattgaacttttagtcaacatccgcacacgtaaatgctgataccaatacataagctgacaaccacttcactagctacaagcgcagtgctttagatgtgctgttaggttatcaagcagtggttagcatcaggttttgcacagcacaactctagagggtgctatttatgttgtgatttgctgcacctttcccacattgcatatggcaccctcttcaattgagcagttgtgatctgcagagcagtaagcagtggctcagattaatattctttatttctcctgcatgtgtgatcatgatagagaaaatgaccatgcatcatgcgcaatatccacacagttaaaccatcaacaacaggaggatccaggaggcaatgagtgtaaagggtcagatgcccaatatctgtgtagtcctgacaggtgggcagagcacagaaatgtagcatcatcatgcagacagacatgtagacaggcagcatcaggagacaatggcaattcagggtttggggaaaggattcccattttgcaggcagatgctttaggtatgaggaagaatggctgagactattcttaaaaggcctagaatcctggacaggttaccaaattggggacctggatacaaaggaccaagacaaagactgtgaagccaccactggggcacaaagtgggaagctgatctcagaaacaagacagaagctcacttgtagaactggatcatacagtctgacagaattggtgactatggtgatttgcctctgagtcaactaagtgttgaagcacatctctttaagtccttgtgattaaagacaggattggtcctagatcctggggcagggattagtctatagatgggagaaatgtgttccatgcagtggggagaggtggccatgagagcacaaaccaaggcaggccttaacagataccttttgcactgtcacttcccagtgatgcataaaacactgtcattacccccaggaggtggcacgttctcaaatttcaatagcttctgaaaaggtataggtaaattcatggatgaaagacccagagtgaactattaatggaaatggggaaattatggggcacacatttaacctttgggtggatattggggaataacagtcttctcccttgaaaaaaaagtggcccccatcatctgagagggaacacaggcagattgatttgtatctgtgatacatatgtatcatgtatctataaattatattataatattaatatttatgctactagtagcccacttctatgtatacatcaaaatgtatattcacatatatatactctggctgatttgtcatgcaatcttacagtactaatctctattccactacattttccttgaggagaatacctaaccatctctagtcctaaataagcagggagccaacagctttgcccttccttggtcttgggaactgcagctggccttaggcatgggtagaatggagccatgtattccaggaaaacagaccagtcgaaagcaatctaaactcctattaacagggtagcagttacagaaaagaagggtaccaaagggataaatctgcaacagaagcttggccagatggaatgagcaggtttgagaagttgatccaagatagattcccaagggcaatagatgatgacgataatgtgcgtgtgtctgtggtttgtttttcttgaagcatatcaagcgaagctcagcagttcaggataccgaaccagtcatatgggtgagattcataggtgattcttctctataacttttaaattgtttaggcaagtacttacacattgtaatgcagattgttgaatgcattaataaatgtttgttctgccacctcaaatggatgtttgcgctggacctgtttcaacaaatcatatagggactccaagtcgttgaccattcgcaggataatccttgaagagggatgcagctccgccatagaaactgagattctagagggtggaaaactgtacctttacacccactctgcattggttcacaagtcattgctaaacggacagtgtggtctcattacttgcatgagtgagatgtggtatgggagacttggaggagaacccaaacactcagtccagaggaactgcttccagcaaaatttgagaaagaattccctttcaagtcttcctctatgttttttcctgggggcaagagactctcttagaacaccaggaaatgaaccagttggagtgccacagggccacgattggtctattcttttctatgtgcattcactccctgggtgatctcatccagtttcatggtttcaaatatcttatgtcaaccactcccacattcatatctccagttcagctctctcttccaagttccaaattttgcctccttaacatcaccagaggtattatggacaaatgaaaactcctaacctacctcccaaaccatgtctcacttgcagcattccccatttcagttgattaccactccttttttcagcggctttagtcaaatactttagcataattttgattcttctccttctatgacacacaacttctgactcatcagaaaactatgaaagctatatcttgaaaacatgtccatagtctaactgcttctactaatactttcttgacccaagtcctcctgctttcttgcctttattacagtagtctcctcactggtctaccaatttatcttccctggccacagtctattctcaacacttgaaaaagctttcagtggatcctcactgcgttcagagtaaaagtcctttacaatggtcagaaatcctcctgctcaaaatatgttccatggagcagcagcaccagaggcactagattagagatacagaagctcagcctcagaccaagtggatatgactcttccttttcacatgatctcagttaatttatatatacttgaaagttgaaggtcactgttctgtaagccccacatgatctgtgtacctattattatttgatctcatttcctacccccattctttcccttgcattcgcctggcagcgttcacattggcctcccaaactttctcaaatatgattggcatgctcttgacttacggctttttcattggctgttccttctgcctaaatgaccatcctccaaccatcaatatcactaactccctcacctccttcaagcctttgttcaaatatcaccttctcaaagaggcctattaataagccagagtacccaattccgcttgttaactacctcttgctccacgtacctaatctccatatctgtcttctgttacttttttccttagcttttatcacctactgatgtattatatattttagttattatgcctgtttttatcatctgtttcccactgcccccttccatgaaagtcaactccaccaggacattcagtgttatatgtgaagtgcctaaaatcacctttgacacatagtaggctctcaacaaatacttgaataaattgatgaatgcaatagagatattctgtcacctgatgctttgagaagagtggatataaacttttgtagcaagccttctgaaacagtaggattttttttccctcccagaggaagtacaaagttctgaaagaagtaggaaggaccctctcctggaggcagccttcagcaaaggcagagtttgtggagagcatttcctttccccttggagaatatttgaggaacaatgttagcatcttcttaaaatatgatctggcatttggagcatatgtctccagctagtaaaaggcatgagctctgcatggttcaacttttcaatgaggctgccttacgacattttaatatattttgactctgtgggccagatgtggagcagaaccaacaaatagggcaattacctttcaaaaaatacccttttctcactatgcagtcattctcccaatgctttttcacagccaaagctataatttgggtgggtctgaaaaggatgacagaggtagttacttttggaaaccagagagccacacttcaaattatggttggctgcagaactaagccttagacttataatctcttataggattctacttgcacagtcgtccccattgagccatgtggaatggatggcttttgttatgggagcaacattgttgtttataatgactctgcacatcctggtttctggagtgccggattaattttatagccatggtgacttattttggcacctagctacctcaatgtaaacttatctcattagtatgctgaaccgccagatacttttgtacagtttcaccaaataagtagccaggccttaaagtaacttaaatgcaattacaaaagaatcttttggaatgaaatggtgaattctgtctatttgctcccaaaagatcatggcagcccatggcacatcaaagtgactagtcaacttacttttcaatgctattgatgatctagttttgaatttaaccattactgtcaaactgagtggatttaacaaaagcctaatttattatctgatcaatttgttgtacctttccaggatataggatgaagccttgaatactaattgctcagagctccagagctcctccccattgttgccctatggacaggcaactaagggacagaaaagccccttcagtgtccttgatggggacactgaattaatatgtatcatagtagtgtgccctcagctgcagctgagtgaggtgcctcacttcttagaagaaattacttggaagaggacatcatcaaagtgatgcgtattgatgagtcataagatttgctcataattaccaagtgccaaaatattctcctagagctaatccagagcctggtgtccccagggtgtcgaggagtccacactcaaaagtagctgttttgaataattcatttttttgtaaaaagaagaattaatttaaaaatgtaaactttaaatgcccaataagagttaacacttattgacagatgtgctgaactgaaacaatttccttgagtgcagagagctgctttctagagaaacatgattttcaggagtcagtgctactctcttgttttgtagcttctagctgcacttctaggaaaagtaatacctcggacagtagtgtttttagttctttagctgtacaatgaatgggaaatgaactgtcatctattactcttaggacttcaggggaaatacttccctgagaggcagttgtatggctgcccctgaatccctggctgcctgatttttccattgtgatcagttactgctttgaaaaccaggggttttcaagatgggtatgttagaaattagatcatatattctcagactagaaggcagatgtctttgaggtctctctgaaatcctcctacttgaaggactctggcatgagagctgagtgtgtgtgagtgtgtgcgtgtgtgtgtttatatggggaaaacctatttgctcctctctatgcgttcattacacatctatattgtactctaaaaagtgtagtgaattctatttcaagcttcctttttcatttttagatatatctcaggaaacagactgggaacaaaatataacctgaaaaaacaaagatgtcatttttgtttttgttggtcgtgttgttgcttatttgtttcgtctttcttccttcccacacaggaaatctttacctgggagggaacttttcttctgaccttggaatattcttagctgctgtatttccttcatgccactttttgtttgtttgtctgtttaagcaaagtggcctccacccaatgtttctgggtcctcactctgaactttttataaccctcgatagactgacttctacccttaacaagtaatgaaagtgctttaaccagcattaacaaattagggagctgtcttttctcaatcttctggaaatgtctcctctgttggcttcatgcttttctccccacaatgagtcatttggcccaccctgacccactgttttgttccttttttccaagctgggccacaccaacttatttcaaaaggcagattgacctgagtgcatggcttgcttcagctttctttgacaagtactgtgtcctgaacttcttagaactcattaaatgttgataatgatagagagattaggacaactgcagcttctagggataaggctatttatttacattttaaactggaattacatgtgcatttgtggggctgtgatttagagcacagaataggaatttaatttttaataatgaggaaaaaacaggaaatacaaggacagaagggagtgagagacagagcagagaaggagatatttaagctagagaaacactggaagaaatctaagtggtgaaatacaggataagcctttgtcttatctatttgctaaaggatcatgagggtgggaagctctttggttcactttcttttagacaaaaaattgaacagtgatgcatcatttaagaacagggatacattgtaagaaatgtggtattaggtgattttgtctttgtgcaaacatcatagaatgtacttataccaatctaaatggtatagcccattgctcctcagctacaaacctgtatagcaagttactgtaccgaatattgcaggcagttttagaacaacggtaagtatttatatatctaaatatacctaaacatggaaaaggtatagcaaaagtacgatctaatggataaaaaatgatatacctatataggacatttaccatgaatgaaggtagctggactgaacattgctctgggtgagtcagtgagtgagtggtgaatgactatcaatatcattgtcttccacctccttatcttgtcccactggaaagccttcaggggcaataacagacatgaagttgccttctcctaggataacaatgctttcttctggaataccacctgaaggacctccctgaggctgttttgcagttaatttttttttataggtagaaggagtacactctataatataataataaaggccgggcacagtggctcatggctgtaatcctagcactttgggaggccgaggcaggtggatcacttgaggacaggaatttgaaaccagcctggccaacatggtgaaaccctgtctctactaaaaatacaaaaaaattagccaggcatggtggtcaaatacaaaacaataaataaataaataaacgttaaaaattaaataaaaataaaatgtatagtgtaataaatacataaaccagaatgtagttatttattaccattatcaagtgttatgttctacacgtaattgtatgcattagactttgtacaaaggcagcacagtaggcttgtttacactggcatcaccacaaacatgtgagtaatgcgttgcaatacgacattttgatagccagggcatcactaggtaacagaaattcttcggctccgttataatctcatgcaaccactgacatatatgcagtccatcattgaccaaaatattatgaagagcattactgtaattgtttatacagatgacaatcagaagcttaaggggaaatctagtaatcactagtttgtggaaaccaggttttattccgtaaacaacatcaggacagcaaaatatgacttgaaaatatgagactagacaggccataatcagcaataaatcattgttcaaagtgccatttacaaaactcaggcgcacctacttgcccagggatgtagcttctggcctgagaccgggtcacatcccctccctaactttcactgtagttgctgtttggttacaagtgacaatgaacaatgtataaggctctcattccatgtgatggttcactctgctgctgacatttatatcatattagtacctgccctttccttcctcttggggaagtggcaaggatgattgatgtgaggcctatgaagttctttgagcttcttgggagaaatacatggtgttgtcattatcgtcatcatcacaaaatgcttgaaaatcttttcatgccttgcttggtgctaggatagaccctcttttcagcattggattctcagcctatgctaatctttcctcatgcagccgatcatccaagttctttcctaaaggggattaggaaagagagatgaaagagtcctcatgaagcaagaccttgagaaaaatgatcgacagaatcctcaggtctctgtgtgtctgggcatgtgcagttctatgtctccttgatacctgggatattctcacaagtccagataaggaagaaaccactggctgatacaaaatcaattttcctttggttttaaaatactttaagacttactctaaagaattatgtcctgggaatttatttcacatgtatcaaatcgtaattgtaaaggagtgctatggggaaattgagatccaaaactgctgagtccttaggccctgggccaggggcagagtgaggaataggaatcaggtcccctgtgacacaaagtagtggtctttttttttcttcaccacatcgcaatttctcaacatgagagaacataagatggatagagatgctttaacgcctttttactcacatcttggacaagacctacagtaatgtcattgagctaccaaaagtttgaacttaaattttaacctccaatgccacctgtcagaatacattgcaaaagaataggattagagatattgcactgtgcattggtcttcagaaacttctggaagctggttgtttctgagaagtattctgtgaacacctgtattctcagccacaaatgtcagagccatgagcgaatggtgtgagacagaagagtggaggttgagaggttcaaagatcaaataatgggggattacaatggagaatctaacatcaagtaccaggcacgtatgttggggaaccccagcaaagaggaagggagggtgccagaaggaggctagagtctggcaaaagtggatgtgcctgtttgtggtgtcctggtgctggccatgtttttgaggcagaagagagtctccaagaattgaagagaaatcttggattttgtatttcttgagctttagttacccagcttcagacagtctagatgtgtctgaagatgggttgggtgagtagaaagttgccttttttgtgttgttggaaccaaagtagaactgcctcctctcataggtgttggcttggagggccttgctgacaagatggcagttgtgcccttcacagctccatcttgaggagacgtgggtcaacatggactcattcagttatgcattcattcacatgacctggctgaacacaggttgcagtgctctctgatggcacctggaagggaagaggtgtcataagtgagttgctggaggggcagcggtggaagcagggacctgcattctatggaagcatcaggctccacggaaccttgtagagaaggcatttttcccacctaatattgctcaaggttcaggacacttgcatttctgagggttgcttcttccccttccccaaattctggacaatctcttcaactaaaatgtaaactcctctcggatctgactacctggtgtccacttctacttgctgtgtgcctatgccagagctggcacatggcaggtattgaacaaatgttccttgagtaaatggatgactcctaccatggtcactgcatcatgccgttttagaaggaatttccttctttttgactacaccaccatttgcgattacaatctccttagaacagtgggcaataatacattgttgtggatttctaaaatccttcctttaaactaggaaacaaacatatcataaagattcacggctgggcacggtggctcacgcctgtaatcccagcactttgggaggccaaggcgggtggatcacaaggtcaggagattgagaccatcctgcctaacacggtgaaaccccgtctctactaaaaatacaaaaacttagccgggcatggtggtgggcgcctgtagtcccagctactcgggaggctgaggcaggagaatggtgtaaacctgggaggcggagcttgcagtgagccgagatggcgccactgcactccagcctgggggacagagcgagactccgtctcaaaaaaaaaaaaaaaagaaagattcattagcagtaatgacctttaagggaactatatcactttatctaccagcaatctgattgtacttgaccaacccagctccaaaccacaggtaaatagcccagctctgtgggcatcagatcaactatacacatgtcctgcggagctgacacagaaccaggacattccatgcacttggagtttagacggagtctcagaatgtcctatgcttttcaataacaatgcaaagcatttgtaatcacatttcaaactcatgtctattcaatgctttaagaacataaatctatacaagaaatatttttatgtatgaactacaggatattcttggaaatatcctggcaccatgcatttctcccttgtgctatttcccacaattataaatcatatgtcttatttgtggtctgatttccctatcagtctataaactccatgaggtaatgtacctggcctgtctcatttacactctatctggaagggcaaacacagggtctcaatacacattcactgaatgagaaataaattaaaaggcaggtaagtaagcatcctttcaagagtttttaatgttttatttcctctaaaagaggaagccaaagggggtctttagaaggcatgagtggtggtgccaacaagtgttgatggagtccgcccactatactgagaggatatggtgttagcgacactgcctttgtggcctttgtgtggtctcttttgttcaccatggtcccttcttcatgatggcagatggtagaatcagggaaggaaagcacgtcagttggtgtcccagcagaaaacagatgacaactctcaaactgagtaattagggagaatttaatgagtggagctttaccaagatatttacaggttaagggaaatctataagggatgatgaagctgcctgtacccaatcatggaagggagtcattactacctttaggcttccatggaagcagagcctctgtgttagcacaaagctatagaatattgtcaaaaggaccacagcttttcaatagaaatacagagccaacccaccagggaggcagtggggatggggctggtggtaaatatccgcatcctatactcctcccatcttccatctgctaacagtgcccttcattggctgaatccaactgaaagccagagagcaaagtgcttgggatcccacttgggaggtcagcctctctgccaggcattgggaaggctcctagagatggaagagtgaatgaataaagcacagtgcttactttcagagagctcccagtcaagtggagagggctgtgctctgagaggaaacaggtgaggaacctgctgagaaagcacaaggagaggatttccccaaattctggcttcttcaccagggggcttcccaatggaagccaagtttcagctgtgaatcaaaggctgggaaggagacagggtggggcaggggaagacaggaagaacagttgggaagaaacaccaatgttccaagcagaggaaaagggcaggtgcaaggacaggaagtgaaagagctcatcgtcctctcatggaactcttgaaatgatgcccagacttaaacaggaaggtttgatgattctcagggttggttattgactcaacaaagcctgctcccaattttctcctagaaggtagataaagaagacttgatgtgtccaccatctatttttgaaagcctggtatttgtgagcattcccttctgtggatcaaccagaactctcctagtcaccccttctgtgatgactgtcatctcctctaagtgtaaaaggagccagaatttctgcctattattttcagattgcttcctctacaggaaattgtgtcaattcatttggacatttgtggtttcactgtactcccgggccattacatcattatgtggtaactcagaactccagtggcacattatcagagctgactatttctggaagccaggagataacaaacaaagcggtttcatttggcctataagcatgttaaacaccctcggcagaggacagcagaatacaaatatgcctgcctcctgacttttatcaaggagaggcgagggacgtgggatagatataaattatgtgccctgcttcagtgagatatctatcataaaatctattgccaccgatacaaactggcttcagtgtataatttagtgacagttttgtgcattatgtctcctcgccgacaagattgctgcatggcgaatgttgccatatctaggtatggatggaactgcctaaaggtttaagccattttattccatcctgaattaacatgctcagcctaatcctcatctccccgggagactgggaattgtgcgggagaatgagcagaagcctttccatgcaggtggctggggcctgtgtttccacttgcctgcataccgttcccccttgtgaggctgctgattgaaacttactctaagattaccttgctaataatttgagccttatcagggaaaagaaaaaacacaacaaattaatgagatttctgccaataaagaaatataaagggcttactttcctaaagatgcctgataccatggataaatcatagacaaatagaaagcttgctgtagtttatgcctaattataaatgacttaataccaagtcagacccaaaagattcggaggtgtgatctcgttagagggagacagaactacagtatcaagattttcattaatgcaaggaagtctcttcttcactgctcatgtttagcattatccttggggcaaataaggaaatttaccttcccacatagatgagttgggttcaggctactgaagtacattgcttaataattgctttttggactaggccaggacactgaatgttagggcccttcctgagaccagcaatcgtaggaggtatttatgtcttgctactcagtgaaccaggtagggcatgagcatattaatgagacaaaaaaagggttccttcatgaaagtgctcacggacacctgagcatctctacagactgctcccttcctaaagagggactggcgaggtaggaaatgggctttgtttctgcctttgttcctctctttttgtattcacagagtgtctgtttctctgcccacttcagggtcttcatctgtcatacttccatgtgactttgccccctgcctaccagtagtctctctctctgtccttctcctcttgtatcacaggtgatctggatcaatgagactagatattcaaagagatagagaagatgaaaagtgatcacctcaagggtagcaagaataagagatttataattgtctgaagatggcctaaaatcaccatgggccttttatggaaacatagctatgcttctcacctttttgcaaacaactgcttcatcatgagacaccttagaaggtgccccaaagctttcaggtcaagccacagtgaaatctctgctgcatagttggtcacatggaggacatcttcagggcttcctcttggactcttcaaattcttctaccacctgggtaagaagtcctccttttccttctctttctcattgtctttatgctttctatttctcttttactaaatcctgcttttcagggtaggttttaaaaactcatccacaaataggaatgggaagttgaaaataagtataatcattttcctagggagcctcacttctaatataattgctatcgactactcatctgctagagagggttaaaaaaggcccctgaattggctggaccctgattcaaaatgctctcagaggtctgaccccactgtaaagtcctgtagttctaattgtgcaatttcagcctccagtgagggtagaagaggcaagggagccttgcaggggtctctgaaatcagataggcagttttttatgtcatttacttagatggcagtttaaaagagtgacaaaaaacaaaaacaaaacaaaacaaaaaaataaaaaaacaaaggcgaaacaagtccagtagggcagcagaaggaagggggaaggccacccactatagaagctctcagcacctgttggagaacagggggagcctctaccacctcctctttggtaagtggtgggattttaggaagtgtaaaaaagagaaatcctggcttttaaactagtttcttcaccaaggtaagcctttgtgtctaacttcaatatgtgtattttaattcttcattttcattcttgttgcttccttccctgctaccagctggtaccccattcctgcaggactttgctctcaaccagctgtcccatatcttttcttcattctgaatggctaaggcctattgaccatttttcttagggctgtttgccttttattaaggaatgtgaatctttcaaagctctcatgtactataattgagagaaggaaagctggaaaggggggtcctttttgggggctgaataccgaacagcatctctaaaaatatttcccatgagcaaatatgtattggtaaaaggctagttttaaggtaggccatgacttgaggggcactactgggaacctgaatattattaataatcctcccaaaagaccagacttattcagaccaaagcagctagccagtattggccatggccaatattcagcaatgcctgctagaacgtgcatatttaatttggaatctgtaatcagtagataagtaccatcattatgggggtgggcagccagcttttctcccctgccagaaatggtttatgtttgcttgctttggttttagcttttgttggtggtggtgatggtggttggcaccaatatggaaccaataattattattattttttttttttctgagacggagtctcgcactgtcacctaggctggagtgtagtggcgtgatctccgctaactgcaacctccgcctcccgggttcaagcgattctcctgcctcagcctcccgagtagctgagattacaggcacctgccaccatgcctggctaatttttttgtatttttagtagagatggggtttcactatgttggtcaggctgatctcgaactcctgagctcgtgatctgcccgcctaagcctcccaaagtgctggggttacaggcgtgagccactgcacccggcctgaaccagtaattcttaattgggtggtcctttgtttactcattgtcttgggactttgctcaacaacaggaattatctccatgaggagtgtttgccaaacactttaaagtcctgtgggttaactgcacttttctaataaaaagacaaaaacagacaaaatgatccactcaaaagagaaagaagcagctctaattttgaaagtggcagtgacacactaaatatatacatttattaagaagaaattttgaaaaaaaaatcaatgtttaacttatacaagtgttttaaaaatgtatgagtatcttgggtgcatatttttacaaaagagtgttttgaccaaaagttatatggaaatgccaaaaaaatttctatgatagcacatatagattgttctggaacttgctggagatctagttccaaaagaaaaccagcctttcaaagattttctgtgaaattaattgatgaaaggtgttcatgtatatatgtgtgtttctgtgtttgagattcttacagaaaataaagtgttttactgagttcacagcataaaataaggaagataattttgtatgccaatcttataaaactcatagcctcttactttatttcctcaccatgtctgttttctttagggcattttgagcagtggggaaaaaggaaactaaatttatattcctccttagacgcttcctgaagaaaaggaaaaataaataaatactggaaaatgcttgtgaattttttttcatgaaaatttctgtaaaataatccactgttgaaactgctaacagctgttttttcacactctataacccccagcaggtctgaaaatcccctgcagatttcaagatattgcatgtcagtagagtaaagcacagttctttgttactattattttaaggccaggtttcccatattacttcaacataaaaagctcctgtgctatgtaagtaaatgttttctagctggcaaaaggtagtatcattttatttccatccagacatggggtgggaggatggccacttcagctcttcatgcttgactacacccagaacaaaaccaaggaaggtgtaaggcacctggttgatgtaatcctgagtctctgttttaaactttaatgtggacactgcattcatttttagctgaataaggacaatgcttcagctcctccacacttattcaccatatcagtgttcagaggaataactaaattcttatgcattttcagttttgtctttacttaagctgtaactaagatgagaattcccaagaagaaagccccacatctagatcttgctcatcacttcatggctcctaagggctgattgtccaattttttttaaggtaaccaagagtacagtcctcaaactttagtcaaaggcttgcaatttgaagtagagttggaaaacaggcaagttggtctgcggggccatttaacttgtatcttacttttatcatttcattcctctccatccttctcagttggccaacatttagaagactggattttcagcctcatacgtaattgtggaatgaagggatatttttctctttagcatgtagtcctgatatgcatggttcaataaggcccaccaccatgtagcaggatagataaaaggaaaggccctcctttaaggttgctacagggaagtttgacatattatttcctctcatattgcattagccagaactaggccacatccagctgccagggaggctggaaaatgtagtttttatcctggctggccctttgaaaatacatacagttgaccgttgacctttgatcaattcaggggtaaggggcaccaacccctaacacagttgaaagttcacatataactgactctccaaaaacagtgaataatagcctactattgtctgaagtcttatctataacataaatagttgcttaacgcatatgttcatgttatacatactatataccatattcttacaatcaagtaagctggggaaaaatgttattaaaaaataataagggtgagaaaatatagtcttatcaataacataaatagttgattaacacacatgtttatgttatattattatataccttattcttacaatcaagtaagctagagtgaagaaaattattaagaaaagcattaaaaataaaatatgtttactattcattaagtggaggtgtatcatcataaaggtcttcatcttcctcgtcttcatgttgagtaggctgaggaggagaagtaagaggagaggttggtcttgctgtctcatgggtggcaaaggtgtaagaaagttgagaaagtgggaggagaggcaggtgaggcaggtacactggtataacttttattgacaaaaatctgcatataagcatataagtggactagcacagttcaaacccgtgttgttgaagggtcaactgtattgggcaacaaggctttagctggaaggggaggctcaaagtagggatgataagaaaagggaggcttccacacaggctgtcatctactttcctaagcctaacctagtcacactcatgaaagagattcaaattcttctggatgtttctccattttagctctaagtatctgtagcactaaaaaaaaaaaaaaaaacaagtcatcttcactttgaggcacacttttttacttttcttaatttattttctcaatatttaattagtgatggctccactagccctatttggaaagagctttgttccacaaatgagggtcattgatgtaaaccttgtggagatgttagggattcagggaaggctatcatatttatttttcaaaacctacatttttcttattttgtaagtaattttatatgaaggggtgatcgttccagccatttgctgccagtttgaaagagcatgttccaggaagatatttaaagccttccatgtttcatgttcatgttcatgttcattctttgggtaatagtcgcagtctgaaatgcagctcctaccaaaagtcatgattcagcctgagcttaccaagttctcactgccatagggaggaggaagcagtcaccatagctccactcagcagtcaggacggaagcaaaggtatcacatctcttgtttcctgtcatgcttttgggctgagaagatgctcttttgatgatcctctcaggccccgactcacatggcagaacaggagaagctatttgctttgacagatacataccacaggtgtagaggacccaatttagttgaatctcctttagaaatggtggacttcatgtttttaaaatcttccctgtatttctctttgtcatgacaaacacattcagacagaacatctaacttgtgagtaatccaaaataatttgagcaaatgcattaatagatttcattctgaataccacatactggaatttaaaacaacaaaattaagaacttcataattagacaatagttccctaaattggggcatttatataaaagaccattgtcatataaaatatatacgtaaactcaaacctttcttctcttttaacaaatcctctatgattatttctttgacatagtttttttgctagtttacctaattaagatcacaagatttttaaagagacctcagacagattttgaatatactgtgaggaataaagggcattgccagaagtcagaagtctgaagagatgattttaagatcaaagctttcccaaatacaaatcctagcttaaatcacttgagtttgtaggagatgtatagagaaagagtgtgggtccgaagccatgatgaagggtggagacagacaaatgtgggttgagtcctgctgctgctactcattaactagatgatcttggaggagttattaaaacctctcatagcctcagtttccttgtctataaaatggggctaagaatggtgcctgtcccatagggtcatggatataattaaatgaaataattcaaactagtaactcagcacactatctggccagaataagtattcaataattgttcattattattggcataattacttcactatatatgtatttatgaataatgacatatttatacaagaaattaaaaataaggatcaatgaatcatgacagtctatccaatttgcctttaatgtaaccaaaacaaaatctaagtgaaaatgaaaataggtcaaagacatatatctttatatgtatatgaaaagtttcctaccaagttagactccagggaagaaaccatgtattgtcaatttgctataaatacacatatagcaaatagacactttaaaattatatgtgcagaatatcagcttggcattaagattgtggtttaaagtgcaaagaaactaggattcaaacaggaaatcctcatcataacctcactctgcccttttgcctccatatgcataaacaaattatatttggtctttcattacatggccaaacatactggattctgtaacatagtttgtaccaaaattatcagatattagaaagtagctacccatttggcagatgctattttaaaaaagcactttatatcattgaacatattttcaggtaaaggcactgtatatatgtggatatgtatttgtgatgatctcctttttgacaaatgaattcaatgatttagttggcacttactctgtggttgttcattagaacagggattggttgagagttgtggggacattaccagtctccccccagactcatcccctccaaggggtcaatgtcaggacacaatgctttattgggaatcagtgggagagaaagctctggctgattccagcctgccttctcttcctgcagtctcccccatgcctataattatttattcactttcctaatgaactaccaattagaggtcatgttgttatggactgttctttgcatgtgttggaggggaggggattcttgttctaaagcacccagtggactaacagaatgttccttgtggtattaggttggtgcaaaagtaatggcaaaaccacaattacttttgcaccagtctaatacaatggcacctctactcttctcttcacactatacactccagccccactcccggcagttaattcctctgcctctctttttggtatccaaagaccttgaccatggcgagatcctggagaacattctcaagcctcaatgtaaaatcagattacagtccaggaagttttcctgtaatggtcataaatatatttgaattctctgaaaattagcctgtcttggttgactgatgtctttttcagggataatttatttgtaaagaacttccttccatcaccatcaaaacaaaaacaaaaccaaaaaactgtcaatgaataaagacatttattgaaagaatacagtaaaatctcctaaaatctaattgcatgaagtgcatctgactttcctggaacctctaacagtctctctccctcctcctctgggtttgcaccgttattcatctctgctgtgcatttgacatatccctctcactgcgcattgacttttcctcagggttcttggttccagctccctatcgctttggcttacattaagctttgagttgctatggcactgattctggctccaaacctttattagatgtcaaagtcaatcccaaccttttcattctgggtctctcagtacaagttcttaggatggagtattcagttggttgctggttggtgagaggattgattctcatggggcctcttgtgcactccttggccaatccacagtggctggtaaagatcctgtggagatacatccttcaaggctgctattgatggcagatattgactaagtatctcagtttcattgaaatctttcatttagctgaatattccatatctgagtacagctggataccaggaaattcactatatataaatttcagggtgacctcattgcccacttttgttggcatgtgtataaagagaagtgtataccacccagcacagtgaagtttcaatttaagctttaaataaaaattgtttgatgatattgatgatgatgatcatgatgaggctaccaagtctgaggaagaaacagcccatcttccatggcacattcacaagtaaaacagaaaaaaaaagtcctcagatgttattaatactttaagtgccaccactgataatccgtaggctggctgtaataaaatagagaagtctttggtgcctaaagtttttatccctgagataatgtgtttatttttcctacctgcctaatgcatctgtagatggtaagaaattataatgattacttgggtgaaaattttcaaaaagaaagcatgaatctagttcaggcagtataggtgtaaaccaataaacccaacaaaaaataacattgcagcctctactctcttctggaaatcattaataaagagacaaaaactttgagcatagacatggtgataatgaatttagcacagcatttatctgtaaaacatatcatggagattattcaatagctgtttatggctattatcttttggaatattgtagagagtacaatagtcagcagaaagtgttttcattcggtcattttctttaaagttcaaaatgaagtctgtagattcactttctctagggtgtgtgggaagcgcgggaagtgaagacagtggagtgacagttcactgagccgagatgagctgtcagggtggatgtgtgactgagggggtgaatgatggctattagtgttgccaaagctgcaccccttgactgtgcccccaccagaccattatattctacttgtgagaggacagggggccattggaagaagaatgtgcagagacaaggtttttggcttcttagatggatggaggatggatggaacttgtttgctgagtttaacatagaagccaaaactgggataccacataggcttgtgcaactcacgctgaatgtgctatggttcctctgattggatgaaagagtcaaaattcaaaatggcagaattgtgtcagatttatgagtaatgtaagtgctttttaaaagtttcattgtaaaatgttactgatacattaactttaaccgaggtgcaaagacagagacatgtatctaatatgaagccatcacatatgaaatcaacccagagttatataatgctttgtggcacagattgccagggtgcctatcacctggaaggaaagaaggacactgagaatgtccaagtgtactatgtgtgtctgtctgtggaacactactagcaagaaggtatctaagccaaaaatgccttcttttttttttaaatggagacaaattatcaccttgtcacccaggctggagtacagtggctcgatctcggctcactgcaacctctgcctcccgggttcaagtgattctcgtgccgcagcctccctagtagctgggattacaggcgtgcccagctaatttttttatatgtttagtagagatgaggtttcaccatattggccaggctggtctccaactcctggcctcaagtgatccacccaccgcagcctcccagagtgctgggatgacaggcatgagccaccacacctggccaacaattactatttattccctaaaggtaaacgctaatgcagcctaataaaataattttcatttaaaataaatagaatagttactaacattaatacatttatattaagtatatgccattcttgacttttataaacaaatgctcatgtaaataagtagcttggtctggcagtatcccactgttggagagactacgtaatgctttcggggatttgagattcttgaagaagtttcctacatggaagaattactttttcaccccacataaatttttgctctatctcatgctcccttacctgcatgcacacacccaaattccttgtataatactgtttctaacacagcactgcctctccctgctacactgatgaaaaacccattcatcatttacatattacatatctgccactttgttctatatataaacactagtctatgcataccaaatgtaaatgtaggtatttgtaatattaagctcaggaaaactagaaatagacataatgtagaacagctttgggggcaaaattattcaataccagagaatttcaggatcagtcaagcaggagggatgagaggatcaagaatgtgacaaaaaaaaaaaaaacacaaaaacacacacacaaaaaaacacaaaaaaacacaaaaaacaacaatgagatgacaggaaaagacctttcagaaaattagcaacagagtctgagaaagctgctctgagggattgagcttatgcttatgtgatgcttacttatgtgtacccggtgctgctctaagtgtttacatgtgttacttgttaaattccaaaccctatgaggtagatacaggtgttcacctatcccacagataagaacataaaggtagacagaagtcaagtaacttgcccaaggtcactgagtaggaagaggcaaagagatatgggatatggggtatgcactcagtttgcttcaaagtacctgatgttaaccaccacacaaaacagcccctaggccttgaccctaaaatggggcagtggatctagatatttcttgattctgaaaaaccgttctattagcaattcaacaagtactttttaagcacctactgtacataagagctagttaccttaggggagtaaacaacaaatcaggtaagttgataccctagagggagttaagacagatacaaaaccactataatactagatagaaagtgacaaaaatacaaaaaaaaaataaattaagacatagatgaatggtatgggagttttcaaaagttagtatttcatttccaggtagcacaggatgagagatgcgggcagggaaagagagaggatatgagggaaagcctcatgtcatgcataattcaaaggtatgctgaatttgtaaatgtgaagattgaatgaatcttcaggtaagtgaaagcagcacactggaagatgttaagataattggggcagatacagaaagtagcttgttagtttgtcttggcttcatggggaggagtgggcaagaaggcaggaaacgtgagttaaattcaggccatcaagagcctcaaatgctatgctgtaggatttggattttatttggttgggaactatgaacagttttttaactgctttggaaagattgatctgtgatttagaatggtgtgattccttgaaatgctaatgttcccggtagataaagctttcatttttgttcaatttaatgtaacaatcatttatgtagaactcttctacataaccataaactctctacagcaatgtaccattacattacctctacaaaggaggagttccaccataaatggtggttactttgattttgtcgtggatttgaggagtatagaaataaataaggtattgtcttcaacttcaaagagcttcacatagggattccaaatgctattaagaggtgaaaagttctttgaaggccaagaggaaagggtatccattcttattggggacacaatgaaggcttgggaggagccccttggctctcttagctaatgcaagttcagtctcagtcgtcagattgtaccattggcttctagactcagaccgattgagtcttagaagggtctaggtgttcatcactgagggtctaggtgtgtacaaatcagtaatgatatccatgtcttcacctgaaaaatatatcttattattggtctcatgttgtcttttccagggtaaatattgattatgaatattgagaaaataaaatgtagttaagaacaaaacatacaatcagctattccatatccattacaactaagccaatcataatgtatttaggtcactaaaatccataattcccaaagatggtattattgtacaaggcagaagtcatagagaaacctaagaagatggaaaaaaataactttaaaagttacccaactcacccaagccatcactgaatatttagggagtaatttctccatgtaaaaatacttcatgctctttgccttaatcagtctttattatacacttagataacaatgcatgaaaacatttaattaagaaaacatcagtgtgatgcatctataagcagttagatatagaagtcagataacaccaaggtggtataagaagcatcttagaagagtagagccagtgattctcttagaagagtaaaaccaggaaatactggttatgacaatctcttccagcataatttggaaaaatcacaataaataagaattaattttatagtcagaaagtgagaaaaacaaacattcctcttttcacactacaaataatagagagtaaagcttgataaatgtatcatggctaggagggatgggtttgaacagattataaaacaacaaagcagaccctccttaaagaacaaatacaacttgtatggattaagaggataaggcaagatgctgtttagtcaggaaacgtggtaaataagtgttcaaggtagaaggtacaggttagcccaggctaagtgggaagcagtgcctccctctgcttagctgaggtggcacttaggttgaagcattatgagacattggaaagttaggcagagtttagattaggtaatataaggcattgggaaggcactgtaagtcttaaaaaggagaaagactttaaaattttgtttatgtatacagaatgaattagaagaaataatactggctcaaatgctctgccgtgagttaggcttgagctacatgggtctgggcaaggatgttggcagttggaattaggagatggaacaaatttaagagttgcctcagaggaccaatcatgaagcttgatgatagactggctacggaggcgcaaggaaggaagtaatcaaggataaatgacgtgtgtctcaagagttgctacctttgtgtctgggataatacatggctgtcagtgggaatgggaatgctgggctagagattctggagagaagggagaatgtgtagtttggtttcgaatgtgtggagagttgacaagagattatccaaatatcaatcataggcagcgatgcaggagaacagttagcattggaggagtagacgtggaagtaagtaacatggctgtgggcacagaacatgagactggatgtgctcttcaaggagatgattcagaaagaagcaaggcagaagatcaaagcttgagagcattacacagaattagggatggggtagagagactaagatgtgatcagagaagaaaaggacagtgcgatgagatattttctcaaaaactatagtaatttgatagaagctacacattttctgattgctcaggatccaggacattcctaattacagtcagttgttcaaatttccacttcctcatattatattcttcacatctagtagtgtctggtccaggataggtatcaatagatatttactcaagaaagtttgaagaagttgggtgttgatacaatggggttaaaggcttttgcagtatgtcctgccctccacttcagttcccacaggacccagcagcatgtcagacaagttgaggtctggaagagccccatatgtcttgtatctctttgagttaaaaattcaaacgaagtcccagtactaatattagaatatatcaacttcagagaagccagcatcttagcaaagatatcttatagaatcaaacgaattatctgtaccagaatccactggtctgttgattggtgtgtgagataaccacagtggctattgatacatattatagtacatgacagagtgtggttgtttgaaacagcaataaataggtttatttcaggcaaactttaatgttctaaaaaaataagtcttttttattgagtttagtaacaaataacctttccagaattttccaactgtcaaaaaatctacataaaattataatttcatgtcagaactttgatgtatgtataggggaaaaattaactttagaaaatttggttatttaaagaggatacaaagaacagacacacctttaacaaccatgcagaggatgtaaacccaaaggaaaaaaggaaataatttgcctggtatgaagaagatctacttagagctcatgggataagattaggaaaaggcacattaagctaagaatcctgaaaaaccctcttcttattgagaatgttcacactgtgacttaagcttcagggaaattgataaccacgcctttcccggacaaggtgttagaaagcatattgcaagaaacattctgctttgctgaattttattatctagccaattaatgtaaaacataacaattttatttcaaagtctttcctatattgtgatgtgcttgtcatcacctggtactgccactgaaatttctactaacgtgtttacaactgtgttgctagctaacatatcctggtgacaattaaaacactgtaaatttattcccaaaagaaataggctcacataatcaaaagatttataatgttatattaatgcaattttaaatgcctctgagacgaaggtcatttgccgtatagtccctggctcagtttttttttttgtttgtttgtttgttttgttttgttttgagacagtcttgctctgtctccaggctggagtgcagtggcgtgatctcagctcactgcaacctctgcctcctgggttaaagcgattctcctgcctcattctcctgagtagctgggactacaggcaagcaccaccacacccggctaatttttgtatttttaggagagacgaggtttcaccatgttggccaggatggtctcgatctcttgacctcgtgatccacccaccttcgcctcccaactggctgagtcttataccaaggaaataaatatacaaacaggagcaaagaaaggaactacagctcttgattatttgtgcttagcactgtgggaagcacagatacaactgcaaagaaatatagccaaaaatacaagttcgatccaggagttggtggatctgggcccttctctatcatgatggagttgcatttcactggggaaatcattgatcctgttggtatctgttttctcatctgtgtaagggaatgatacaagcctctctggtctcacaaaatgcattagaatgcactttgaagagtctggaaaactactcatgcaagagatgatcaggagcatgatttgaaagacttttatatttagctgtgtgtgtgtgtgtgtttgtgtgtgtgttgcacttacatttgaatatggatgtgtctactgctctgggatttcaaaacacttcaaactatgtaatgaagccacactgtgaacacttaattaatttagagtaggtgctgattcttaataagaactttaaaacatggtttattgtgagtaagccataattcagggaatccacccacatataaacgagatttgcctgtagcttagaaagacctactttaaacaggatctgaataaaatgtcaagaaactttatttccaggtttctatggtgggcgacctctgaatgtgagatagcatttcaaaattagcaaggcatcctttgccactaagaaacaaataaagttacttcgttaacttgtactgaaaaaaaaaagcatgcatttactcatttattcagtcataaattgagtctctccatttgttcagtaaacagtgaatgaatatattgtagttcctggtaacgcaggcaggctgttcttagccagtatgcaccagacggaggaactggatgtgtgcgtggatggtgtcctaattggtcagcagctacataccgaatagaagaatgaagagagaagactggcctcagggagtgcaccatctcattgaaaagcaatatgatgaatcttaaaatgaagtaattcataccatccttggggaaaactgtggaagggacaagtagagctgccctagggaagttgaggaattcttcaaaaggaaggtcagagtgaactgaaaggaaaaatagagtgtcccaggtggccaagagtcagagtggggagcacatttcagacagagagtacaatttttctaaaagctgagaactgtaagcaaatttggagtgtcccaagagcaagaaactcattagtaatggaaaagaaagctgatggaatagagtataggacagaagactgaaccagacttaagaattaggtataaattacaagataaaggggaaccatggaagaattttaatgacatgatcaaatttatgatgggcacaatacagagaggctgtgtttgagaaaagatgtagaccctgccttcagggagctttctgacattcttggatgtgacaaaacattcatgtgcaacatagtaaagaacattgcaaataagaaatactcaagtgtttggttgaaaatgctgttaggaaggctagagttgggatgaaagttttccagaaagatattttagctccactacactaaaaaatcaacactgtaatttgactcttaaagtatctaagtgtttctacaaagacgatatcagcataaacaataatcccccaaaaaaattcaagatgaaagaatccctatagtaaataaaaaactttcatgcccagaatcatccagattctctgttattgtgagcctccgaaaaattgcttgatctctacttggttttgtgtggactcagccaaaactgatgtttctaacagcattttctatgtagtaagatggtgccagagacacaggagagaaatggtagaggggaaaaaaagaactgtgaatgaatcctctctgaaattctggcatttcttcagagatgtccatggtctttcccctttgcaaaataccattcaaaaacagaatcctgtatctacagatgatcgggggaatagcccagctgtgcttttcatatatgcacctaacttatttcaagggtgttgctgttttatttttacagctgcaaagtgttagcaatccaaaaagagctgccaagattacaatcagttgaattaacttagggctgtgttcttggtagattcagagctgttctaaatcagttctctgtgctgttgctgaatgctctgagtgatcagagctgtttcccaaacagagtcggaatggttatttccccatttgcagctgcttatttgatttttaaaaagaccctttgaaacattttcacatttccttaaaaaaactgttatatatgcatatatacagagcaagattgctgttataacaagaaacatgaagacattgacagtcagtgaaatcctgaagaccaatcacagaactgaactgcaggtgcacctaagattctggatatgttataataatcagccaataacaaatttctgtaatattagatcctattttcctctgacttccactataatgttcaagaaatatttttctccaaagcaaaataacccaacagtctgacaagaatattttttgatgggaaactaattagattaaaagctaagcctgaggtattctggaatatataaaccttggagaacttatatgcctttctaaattggcaacaagtcaccatccttaggatctccattatgctataggtgctactcctttgagcagaccatagaaatgtgttttattctcaattctacacatgcagttctggactctggccctatgaagctacttgtttggcctggtgatttacaatggttggccaagcttatgtacaactcacaagtaatacactattgagcaagagacctgttttggcttaacaacttaccaagctagaggtttcagtattcctactttgcttccctatccattcctaatgtttacagtactattttgcttcaagcagtactcttttttttctgagatgtgcattttctttttagtcaataacttgtttccgctagttacagccaatactatatagaatatgccagtggaatgtcataaaagcactcgtgtggctttgggggaaacatgccaagtaagtcagatgctcttcctagcaatgactgtgtgtctgttcaagttagctatgaggcttaggacagaagccagctcaggtgtccagatgctcttcctagcaatgactgtgcatctgttcaaattagatatgaggctcaggacagaagccagctcaagtgtcctccttgacctcaggtcaagttaggtgccctgctgaatgttcccacaatgtcctgcacatttactgttgataggtatctgtttagacctttatcatgctcattagactgtaagtatcctgagggcaggggtaggacactgggatgtcatcagttttatatcactatatcagcaatgctttaacaatgttgacacagtatagatgttcaacaaaaatggttttcgaataaagtaaagactttatggctcatgatgaagcatagtgctacagaggaatcctggaataggagtgatatggtttggctgtgtgctcacccaaagctcacctcgaattgtaataatccccatgtgtcaagggtggggccaggtgaagataattgaatcatgggggtggtttccccccatactgttctcatgatagggaataagtatcaaaagatctgatggttttataaagggcagttcccctgtacacactctcttgcctgccaccatgtaagatgtgactttgctcctcattcgccttcagccatgattgtgaggcctccccagccatgtggaactgtgagtctatgaaacctctttcctttataaattcccagtctcaggtatgtctttattagcagcatgacaacaaactaatacaaggagttaaagggcctaaattttagtctacacctactatgtcacctatgggctagttattttaagacaagtgtttttccacctttttaaattattttttttcactgaagggtttgaactaggtgatctgcagtgtttccttcaagctctggaatactataactgttggagtgttatttcattcccatgattttatgacaagaagatggtaacctgctaaattgattctgggtactttcactatgcccaagtggagaaaaaaaaccctttattctaaacaagtaagagtaaagtttataaagatggatagaagagatcagaaaatgaataatttgctagaccagagtgaacttccagagtgaaactatgttggtagacttgccttggagtatttgaaagtctctgccattcatcagaagctttcctattcatctccaataaaataattaaagaagtttggttaattttgaccacgaaaataaactaaaaaagtaggcttaaggctaaatattttaaattttattagaatgttttgattcttactaagtggatgcaaccaggtattatataaaactctgtttttgtaaaattaattttattagactttcctatggtggatcaaacagtcaataacttgcaacattcagcatactttctggagtttcccaatcccaaaatatccaaaataaagtgtgctctgaattttgatgacaacatcagcatgggaacctttgggttaacactaatactcttgttagaatgtgaataactgtcgttatcatctattcaacgaatagctattgaatacatgtttattggctcgaaattgaatatctactatttgtcaagcactgtgctggaaatttaggactcaaaagtaagttaaaaatactgtggtcaattatattttaaaatatggaattgtattttaaaatatggaagtattagtgcatcaggccactgtaacccattaacctctaaggtcaaacaattcagattagtacatgtcatccaagaagtcctgggaaaatggaactcaggatagataaactatgatggagaaaggaatcaggaaaccttctggaatatgaaggactttggaaatagagagaaaaagaagaatgggttgctcccatgtgtggctctgggaacatagaaaacaactttaggggaatcagaaagattaaacagagagggaaaagtaggggtggggggactcgtattttttgggggtagccttcaatacaattatagcctaaagcaagtattttttaatcttgagagcttagatcagcaatctgttaaacgatatgaatggctatgttgatcaataagtggaaataacttttagagataactatatgaaaatttctaaacctggagaagggcaagttgtcattaaaattacagacttatctaaaactactataatgggaattgctatgtaagaaatggtttctttgcaagatggcatgggatgagggaagaagaggtagtcaaccaacaaatctacaccttagaacttgcctagaaaatgtagacatataccaaagagatgagtttttattttcaagataaataatactttaggattctgaagggacccagggtgaacatcaatctgctttgattgaaaattaacactttgggggaaaaaagtataaccaattgagttgcaaattaaggtaaattaaagtaggctgctaaattatccatcactgggtgaatacaatgggcactcatcaatttccactgtaactaccaaaacctattctggatcagatgaccaattactaaggttgttggttgtctgtcctgaaagatacatcctttaggctgtaataccaaaccacattataatttgtgtcatgatacaacaaccttaccacagggccagagtgagacatcacattttcttgacattaataactaatagctcagaatagcaacatgtattcccagactgtcagtttctgaattgaattctgtagtcttcttttactttgcatgtccattattggattaatctaaatctaacttctaagatttaagtaaatataatcggtttttaatatagactcaaattaaactcaaatatatgcgtttccctcatgtatttcgtgaaagagctaggtggaaaataatgtcttctgttactcagaggacagaatgaaggaaagaagccctggaatgaacatctgaggacattctattttgttccagtttagattttgtcttctgtctttagcttgtgacatcatctcttcctaatccatctgccctccttatcatttttcctcccccagtgtggcaacagtctaggctacatgaaaggccctctctagacaggaagcagaaagatgcacaaaactcaaggtggaaaagcatagggacatgagattaagtactgcctgaagctctcacaccaatagctactcacagggacacacactcgctagagtgcatttatgcataagcgagcaatagggaaggatggagctagccctactggaaggggtagggaaactttcagcgttgttatttgctggcatagaaagttttcttttaaggaaacttaaaactccaaaaccatggaagtaaaaagaggtgcaaagtagtgtgaggcaagacaaggaagagttcagagtgtcaccaaaaccaaatgagaaaaacacgtatatcagacataccccattttatcctttgggaatccaagactcaataaattatcaatgtttcccaagattatacaagtagaaagtaatatagcactgggactctaatttaaatttgcctgattcataaattgagtttcttttcactgctttatcttgtctgtctaattaataaaatctagccaattaacccgcactggacatatgtaggtatatatgtatctgtaagtgcactgtatctccaagtattttggaatagaattctctctcagtgcaaaaaaaatgattgcagactaaaaatcaaatcttaacttaaaagtctcaatgtagatgacctagaaaataatgccatggaacagagaactttcctcccccagccccctaaccttttgcatttaggacccatgaccagcaccttgtggccatgaaggagaaacccaccatggtggggcgtgtacatttgatgtgtatctcggtggacacaactgatcctactggaccattcatattcaggtttccctggagatcaaccatagctaccttccagtaagatgaccaggggcatctgtgcccctaagacacagttgtatccccattgcaaagctaattggaatccagcttgcaaccttggccctgtcacaccatattccaacccaattctgtttagtgcttgtgcatcaagagctagacatcctagcagacagaaatagtctgtttccagcttggcctgcatcaggaagagtcagtggaggatcacagcttacaaaaatacacacaaacacacagatacttctgatgtttatgtgaacctgtgaaatgacccaattttttttacattaaatcaacgtatacatacataaatacttcttgggaagattattatttcttatacatcttgagctatgtggctggagaatcaagccagtcttaacatgtagggaaaaaatgttgaaaattaaattaaaatttccccaaattaaaacccaccagtttataaatcttcataccacataagcacctgatattttcccggaaacggtagcaacaccaccatcaccactaatcacaggaaaattgttgtgaggcttaattaatactcactgattagctttatatagcctaaagcttgggaaagaccctactgcagaataaaatgtcttgcttttcaactttactagtaatttttgtgaaatatctcaactttggttttgctttcgtttttgttttaaacatcaaatattctcacagagctcctgtttctatgctatattggtttttaacttttttttacctttcagcatttggtaagtcccaataaaatgaaagaaaatgtgttcatccatctttgttcttctttaatagagatttgtttcaatcatgttgttatctgcacttgaaaatagcaggctcatagaatcttagtttgaagctcaaaaatgtgcatacagcataaaggaaatcttagaaaaccagccacgttggcctaaagcctcttaaaaccttataaaaatgtatgtctaaagcattattaacattcgtctcctacctacatgaaagtaatcaaaatgaagtcaagttgcagctcactgtggctttcacctacgctaagcagatacagaagaaaagacaactccattttctcaccaacattcatcctaagtttagtccaggaagagaatattctagaatttcccacctctaaaatgaaaacatgtttttttctctcaaatgcaaaactgctgacacattatcccccttgatccaatggtatccctgtgtcttttcatttgccacaagctctttgagaaaaatgaggtgcttaagataagatggtgtgctctgcctaccacagttgatggcaactgatgtggaaatgaagggcttttcaaactttcctaatttggtggttgggaatccccagcgatgggctaagtggtaagaagatcaaatggttggaaacacagaagtgggtctgcttagtttttgatgccaagaacacttccaaagtaggctttagtaggcagcatggagaggcagctgtggctcagctgaggggactgctggttgttacatgtttttattatcttaaaatccttgcacctgccagaaacacctccccctggaacaagttcagctctttcttggccctctcccttctggaagcaaacacagaaatggggaagtatacaaagtgtaggcaagggaatttgcacatgttcaaaaatatggaacaagccattgctcttctaatgtagctttcacagaactcaggagactgagtcgtcctggttgccatttggaccttcttcaaagcaagcatgaacactcttaggacagaacattgtgctccataaaaaaaggttgcagaatgagagaatcccctccagtatgccctgagaaactagggatttggtttatagcatgtcaactttagaaaaatacacacagatgtgcacatacacatatatacacacatacacatgtacgtatatatacaaatgcacaaagtatgtttttgtgcacatatgtgtataatgttctgaatctataataatgtgtttgttgtaaacatttagaaaaatgcaggaagttatgataccatataattctaatggactttcctggaagatcttcctattagtattattactaaatataatatcagtattatcatcaatattattaatagcaacaagtgtagatcatgaagcaaggcatccaggcttcttaagccacctcatgagttacaaggacacattgctgaagaccattacacttttacctgaatcagttcatgcagacctaggagctgaaaatgacctttatcactttgctatgtgtattacaggggattctccagtcccgatggagccaaccaagtgcttttctcctatagcacctgacaaagaaaacagatagcgagaaagcctgcagtcaactctgggaatggggatggaggccccgaccccagccttccctgcttagaggaaacaggaaactctgtaccagctgggtgcatgaagggaagcttcttcaccttcttgcaacaaagtcagaagtgaagatgtgaccctgagggtcccagaagcccatctgctttacagagtggctgtgggagggctgaagttcctcacggtagccttgagggaccttttctttccccagcacagtctgcttatttcctgtgaaactgctctcagggcacgaagccactgtatagtgagcctgtggtgactacagtgctattccatatcttggcggtattattgggagaaatcacttaataccatcttatattaaatggaagaaaggttttaaataggattttcaaagatctagaatacaaacacattttcaccatgggtttttttttggactaggaaataaattcatttgtgtgctaccaaatatcataaacatctaggtctactaaccactaataactagaaaactggctttaaagttgttgaaatgaagatgattataaacacttaaggtattgatttgtacaaaccttcctgtttctgagtgcctttaagaaaattaaagggattttggaagtgtgcaaaatggatcttttttcactacagccctaagcaagtatccttcattccttggattaaagtcccaatacttgcctaaagttgcacaggcaatagtgacaaaggtcattggaagttggataccccacccagttttccctttcttcaccctaaaagtgctccatggaagatctaaattctcattaaagagagagtagaaaggtatctttgcccaagtattggccttttgagacactggagaacatgttgctatggtatggtgctttataacctttcaagaggttttacttttattatatcatggaaagctaaaattgaaagagtgagcaaaagtgattgaaaaaatgaattttagaattagggtttcctttacttccaagttttgaagtttatttggtttgatgcagggcaagaataaccaagcatcttctctgggtccattttttaatgttaatggtataaaataaaacaaaactcaaatatttctgtaataccacaagagaggtgtagagacagaaataacaaggaagaggggagaaagaggtgctttatcttgccctcatttacttctttctattaaatgacaaatggcactatgttatttgcttctgctctcagttaattttatgtatagatatggatagaacaacacctttttgtaggatacaatatgtattccctactgtgagaactagactacagccaaggaatctgagtgtgttgtcaaggaaacctccatgattttattcatctccatggctgatcccgccatgttgtctaagcttcttttccccacctacccatccatccatgtggactcagttctatgcagtgatggacaagtgagcatcacactcaccaactgtcatagcagttcctttttccaagctcaagtaatcctcagagctcatttgcaataatttttcaagaggtacatgctgcctgtattattgtctcattcattctcccgtggctgagaaaccaatgtcctgtaaacctcaaggagctcacaacttgtgattactgtcccaagcagaaacatccccaacttggggcaaaattcgatgtgggagaaaatgtaaaagtaaatatggcattatcattttcagaagtgcacatttgccataaaataggcataaattccccataacagcataataaaaattagactagaactatcatatatgaaaggttaaagctatgatttttaatgagagctaggacaactcaggatatcgataagctttgcacctgacacctccagttatatgaaggttttcatcttttgattgcattgattcaaacttatttctgtcttgggctcctgagtgacctatatgagatgagttgctggctctgatccattctctcatgattagatgaccacaactcatgatctgtattggtgggtactcagagagtttgtgcattgcttggccagctgggggcacacttatctcctgagttattcctcagttcagaggcctactccatttggttgggggcaggttgcagagttgggggaagggatggactgaatgtacaccttttcactgtgaccttagagacaattagactatgacaaaaggccaggcggacaaagtaatacacacagactggtgttatgccatgaataaaagagaatacaacctctgcaggacctgtggtctaggatggaggcagtgagctagttaaaagaagaggggagaatgaagtgaggaagaggaggctgagcctcacatactacatttcattttccttcatatctctgtgcttccaatacacagggcaaatacttgactgatatgcctagccctcacctccatcgaagtctaacatctgggactctgtgtgtgtgtgtgtgtgtgtgtgtgtccccttatgcacctgcatttgaatgctgtggtattaacatccattaaagtcacgtgaccaaaaggacttcaaccagggccagagattcagagccatagtaaatgctttagaattatgtataatttcactgaaaccatacaaataaacatgttgctatgaaattgaaatacacagaggtatggatgaacttatatattgctagaggtcatacaaattgataaaacactttgaaaaggaatttgaccttaggtatcaagagctaccaaattaaaagtgcatgcattttgacctggtaatcccacttgtgggcttgtgggactccagcccaaggaaacagacaaaaaaaaagacagtcatacacatatgttcatcacagcgctatgtacaatagtgaaatactagaaaccatctaagtgcccaatagtagaagaatagtgcgatgaactatggcacagacattctgaagaatattttgcagttgttaaactggtggttctgaagtctatgtagcaatactaaaaatgtgcaatataaaatactgaggaaaaccacaaaattatatatgcaccatggttgcaattgtgtgaaatgtatatgtacatgggcagagacaaaaaatgacaatgagtaacaataaaatagctatgtagaagatatggtagtaggtgatatatttccttttctatggtttatggctctcaatgtactttttagcaataaaaaggaaagaaagtatgagcttattcttatcaagaaaatggcaatgtatgtgtgtgtgtgtgtgtctgtgtgtgtatatatatgtgtgtgtgtatatatatgtatacacacacacacacacacacacacacacacacatatggcaaggcaccaagaagtgtatgtatgtgtgtctgcctgtgcacatgtacatattttaggtttctcggggagcagtgacatttttaaatcttaaatttcaaaatgcagttgtttagaaagtaaagattttgagcatgagaattatgactgagacatttcatcagcacaaaattacaagtagaagataggtttgatattgtttcacagtgacaacctgtttatatatatttttatatatatataaaaatatatataaatatatatatttttatatatatataaatatatataaatatatatatatttttatatatatataaatatatataaatatatatatatataaatatatatatatttgagatggagtctcactctgtcacccaggctggagtgtagtaacctcgatcttggctaactgcaacctccgcctcatgggttcaagcgattctcctgcctcagcctcccgagaagatgggattacccagcccacctccacacccggctaatttttgtatttttattagagacagggtttcactatgttggccaggctggtctcaaactcccaacttcaggcaatccgcccatcttgacctccaaaagtgctgggattacaggcatgagccaccgcgcccagccaacctgtttcaattttatgcccttagtcataaagtctttcaaaagttacaggtgaaattccttaaaaaattgtcacactttaaatgacagttttggagctctaaagaacataaatgtttttactttatcacataattgcctctaactaccagttaatttaactatatggctgtaaaattgttttctaaagtgacggtgtcccagcaggattgcataaaacaccttttgcccacacccgcgcctatcagcctatcacccttttccttttggctggcatattttattcctgctaatagttcacatttcctgcctgaaagagcatgtttaaaggctactgatgtattgtaccagtgaatattagacttgaaagagagcacaccaaggggctaaaaagactttaaaatcatgattggaaatgaagttgaggttttgtttgaaggtgcaaaccaggctgtattcagctgtgtgtcagtacaaagctttttttctcctgcacttgtcctgtcttaagcagggcatttcagtgttgtttgataagaaggcaaaaaaaaaaattaaatgtctgtgaattagtgcattacatatgagggactttcccaagctctgctataaaaagtgggtcccatttaaagatttgtatgtttttagagaaatataggatttcaagaataaggggaaaaactatcccaagagcaatgcattgcaggtgcactctgctcttagcaactcattttagaaggatgacagccagagtgtgactacagaaaaaaggtgaggatgagacaaggtatagaaaggcatgggaaaggaaaccaactttgttgaagcacatactttgcaccaggggatctaggcattatctcatttcaccctctctgagcactccatggtgaaaaagctataaatgtcaccacactctctgataagaaagttgagcaacaggaagattggattacttgctcaaggtcacacagcttttgtgtagtatgggcaggatctgaactcagacactctagtgtagagtcctctattcgtagcctctgtacattctggagtccagtacatagccattatgttctccagctgcccttcacagtcacaagacaagagtcagaacactgtagctgcttagcctggagaagacagggaacaagacatgaactcaagttctaagtgaatgagtgcagttcacaagtacagtgctacagacccaacggtgggcaatttgaaagaggagactctctttgcagggatcaatgatgtagccatggaagaaaacaaactttgtcacagcacagatgatcctggccttccatagatgggaaaatgtgttagtaagtcacttcagcattcagttttcctttcccaagagagcacctttatatttgtctccattttgtcatcctgctgctcatttttaagcaagacatggagctgtgaagccaagtctacagtgacacacagataatgaacaatgatgttacatggagggcacacagaccctttagttctctgtcatgtgtcactgctgtaggtaacatctgtgatagatctcaggtaaggttctgttttggtcgtgtagcttctgtgtattttctctaataagcccactgtgaggaggtgctaaagcaaggcggtctgtgttctcagggggattatggtgatctcaggatgaaactatgctcagcagggctcaatccaggataaatgatttataattatacagaaagataagacttgagcttcacatgattttcgctctgattgaaaatatctttgcatgccgtaagtaggcagtgctttttctggacaacaattgagccttccaagcaggcccgcttcaaatataaatccctaatatgttcagagaatggatataccaatcatatgcgtacaacaagtaaaggtagacttgagccacttccccaggaggatgttgaaccagttctaatgaacagaatgctggctcaggtagtctaagggaggtaagatattttgcagagcccagatgtacccctttcaagaatgtcctaatgctgctctctcccaaccccagaaacctctgtgatggcctctgcctccccacagtcatggttctttttctcataacggttatctgttgttaaattctcagttcccaggccctaaagagaactcattcatgccatgaaaactgacaaattaattcagtctaatatattaatggcacataatatcttaaaacactaccccttgcatacaatacgtttcattttaataacttcttgttttaacctgaaatagtaagcaagtaatatgaactaagtgatcattcctgaaaaagtagggtgggaacattatgtgggtatgtgtagtccaagttactaaatttactgaacatcaaaatcatgtggtggtggggagtctcctacaacatagattgctgaggccagccacatagtttctgattcagaaagtctaaggagccagagtatttgcatttctaataagccccccaaagtttctacttagtagaccatattttgataatgattaatagcactgcaaggtctactctaaactaatggctttcaagtggcatgatgtaataggtgatgagcataaattgggtcaaattctcttaggaaagccaaaatatagatactttcctgatagtcagaataaattatttagaaatgacccacagaaccatacctatcaggcacgcataaaacagaaaatcatcccatggaatagctgggggtactcatcatccctgtgttaagatgaccctcatcagtgtttctctcctttaacacagttgcttggagactgatggcactttgtgacagtgagaataaaggcctcattagaagccagaattccagcagaaatagaaatgctacatttatgtttcctggtggttttggcacatacctttacatgttttctttttaattgatatatactgttatacttaaaaagattatttatcgcacaaacaacaccataatagctttaacaggaatcaaaatggaagaagaaaattatcccgcaatcccaccccaccaacaaattattgcttccatttttgtactcctttccgattccccgtatgcacccataatttttctagttgtaatcatagcatggataaaattttgttctctgctttttccacttaacattataactgtgtttgatgaatacataaggattatcatatgaaatagaccaagaaataaatttttctgagaacgcttgcttatcaaaatgtcgaatttgtttaagttgattacctgttatgtatgaggtactatgctgggcattgtgcatgtaagactgtaagaaaaaatgtttcttggccttcctagtatttttttctatttttttattgtcctgttatttttgttattgtctatgggtcatgctacagaagtgtgtgccatccctaaagatattttggaaacacagaactaaatgagaaaaattatgcaaagtcccttttccctcactgcttttacctgctgtggagcctcccttcccaacagagtgagccctagggaaccataacatggctggggctgtgtgctccttttctcacagaattggacaaagatgatggagaacagtaactggggatggtgtttttgtgtgcctaagtcaaaatcaagtttgaaagtattaaagcaagatgtcagtgcaaaggtatcatgtgtccaatttctctcttattgctgtgtgactctgagcatgccagttcatctttctcagtcttgagtacctcatcactaaaatgtacataacaatgcctaccttaaacgacttctcatgattaaaagagacaatgtagagcatctgatagagaatctgacttgtcatacagtgtcaagaagtaaaagcagttatcattacttatagtaccctcggagactacaggaggggccggtgtggtgcagaggagcagaatggggaaaaggaaagaaggcctaggggaaactcaacagtcacttcatgtaaaatgacaggagtaaagtacatgtctgtgggggtgcctgtcacatagcaggcactctatcactgcacttttgcaaagttctctcacctggttaaaatgaaaacatagacttcacagttagctacctacacttggagaacctacggttgtgattttactatgtatttaatttgaggttaacatgctcttaaacatcaacactttcacaaacataatgctcagtatgaaccaaatgcatagataagctttttttcttgaagttgatgtcttgggtgccaccttcattaaatacagctagaatggcctgcattagctccatagtgcttggccacctgccaagtgcagggaaatcagcctgaattccaatctttataatagatgaaccaaggacttactactcccctcatgaagcagaactgatattgtcattaaagtttagtagctgtacacttcacagagagtgtatttgctgggttttggttagggaaatcacatcaggtttacattttcttgttagttttgaatctacttccttgttaaaggccagtgaatacattgaagtatattaacatctcttcatcaaagggaaagcgttggttgttgggtctggtaactctgctgttagaacgggcctgttaatttgttaccctacagtgaatgcaaggtaagctgtactgttggtggcaaaaggatttgaatataaattccttgccatgaagagaagcactaaatgaaacctacaattctgatgaagcctatagtctcttggaatgtgcaatgccagctttactctgcatccttgagtttggaagaatgatcaaaaccgtgtaaagcaatctcaccagccgtccgtagacctctgatactcattactggacacatcatttcacttcactggacctcaatgatcccatatgaaaaggtacaatcgtggtagatcatctgtaatttcttttacagcactaacctcctctgacttcataggatatactgtctatattctatcattatattctacaaactgagtgaaattggtagaaccaaggttgagctttattcattaattcatttatttactatataatagctatgtcaattgtataccaagatattctgccaatgagataaattacagagataaatccttgtctgaagctgatgctcatatttaatagcaaaagtcatgtacataaagagcaatgattcaggacagaaagtgccaaataaccacaggcaaagtgtaggatacactgcaagttcaggaaggagagaatcatgaagggcttcatgaaggaggtattttatccagaatttgaaaaatagtgtgaattagacaagcagagacttgcacagggtgaagaggaatgtaaaacatctttttatgatgctaactgtcctaaaagtatagggcatgattatcagtcagggaatcatttactctatcatattcaattcaatctattaactctaaattgtgcactagatatatctaggatttcagtaaaatctatgagacatggaaaataataacagctttgcttctgccttcaataaatgggtttccctggggatattaaaaataatagtgcataaacagaatagttaggagaagagtataagatagaatcagtgtaatttccaaaaataatggcaaaaattaaagccaaaatgtcacagagaagggaagtggagtgagttgaagtaattaggaacaactttataaaggaggctgattttgagcagagtcttggagcagcgatgggtttgaaagggaaaagatacaacattctagaaagtgctaatagatgagaaaactcatggaagcgtgagtaagcttatgattttgaatggatagattaagagattagaaatgaagattcgatccattttgtttgtctagtgtatctcccaagctgctagaaccaaaggcatctggaaagataccattgtaaagacacagcaaagagtcaatgcccaatgctgaggaaatcaaggacacgaatattgaaaaaaagtcttaaagtgtttctcttcaagcatgacggaatggggaggcaaacaaattctctcccaaaaaagcaactataaaactggacaaaatcatgagaaacaatcatttaatactctcaaaattaaccaaagacagacaacaaattaagaagcatttattcatgaaaaatactgagcttcaggtcagaagaatataagtttgtggttttcatgccagtggctgctcccatctccctctcagctttcttagctcatgaaaacaaacagccctgctacccatgctggagaattatacatattggagcattgacagttaaagcttagtagaagctaatagggaggtctagggtctccactgatgttgcagttctgtttgaggcagtcaatggagtggagccagagatttaacagagagttctgggagatgagataggattaaggggactgataagcagtccacatattctgaattgactggaggctgtgtggatgtgcaggaaagactgggaaggctcaagccacccaaaaataccaggtcaatggagaatgcacacattctcagaggcaatagaagacagcctggaaggaagcaaaagataggacaaatgagaatggcctaaaatttgaatgtcattcccagctaacacccagaaaatggaagccttactggctgaaggtgtttgaacacaacttttgaccaatcttgggctgaagtcaaagttatgcagacacagagatgatccctaggaagttagactaaaaataaaacaaaataaatgataatactgagtaggaacatcagcagctatagtttaccatggaggcagacttcacagatatagtctatgtaaattactaaacaaacaaaataaaaacaaaaataattatcttcagaggaggagaaatcagaacccagagttgctaaaatatattatctaaagtgtattcaaccaaaagttccaaagcatgcaaagaagcaagaaagaccagtattcagagacaaaaaaaaatgcagtaaataaaaactggatttggcagaaaagacttcaaagcagcttttattaataagttccataaactaaagaaatctgtttaaagaacaaaaagaaagcataataacaatgactcaacaaatagagaatttcaatgaagggagagaaattatttttaaaaaacaaaagagaattctagagttgaaaagtacaatatctgaagtaaaaaagaaaataataaagggctcaagagcagatttgagatggaaaagaaaaataaagtatgaagttgagaatagagattatccagtctgaagaacagagaaagaaatgtttaaagaaaaatgaacagaacttcaaaaacctgtggaacaacattaagcatatcatcacatgcaactggaatttttagaggggaaaaaaaagtaaagggggaatattatgaggtgaattctgttctccaaaaagacattaaagtcttaattcccagaacctgtaaatgtgacctaatatgaacattgagtctttgcaaatgatcaagatgaagtcattatctctgtgtgccctagtccagtattattgtgtccttataaaagggggaactttggacacagaagaacctgtgtagaagaaagattatgtgatgatgcagagaaggcaaagattgcctcggtctaacagaagccagggaaggggcatggagcagattcttcccacatccctcataatgaaccaagcttgccaacatctgctttcagatttctatcttccagaactgtaagacaataaatttctgcttaaatcacccagttcctagtatgttattaagggtgctcaggaaactaatacaaaacagaaaaaaaaaaaacaagttttgaggaaataatggtttaaaacttcccaaatttaatttaaaagttattaacctacagatccaagatcaatgaatctcacacagaaatactcaaggagattcatatctggacacattacaggcggtttatggccaaagaaaaggagaaaatcttgaaagcagcaaaagaaaaatgatccatcacatacaggggaatgattaacagctgatttattgtcataaacaatgaagtttagaaatcagtggaatgacaacttcaattgagaggaaaaaaaatcttgtcaaccaaatcttctatatccagcaaaaccatccttcaaaaatgaaggtgaaataaagacatttctagataaacaaagactgaaagaatttgttgctatcagatatgccttctaacaaatattaaaggaagtcattcaagctgaaaggaaatgacaccaaagagtaacaccaaatcctaagaaaaaaactgaagaatacaggatattttaaatataggtaaatatatttaaaatatataggatattttaaatataggtaaatagaaacaattctataaatgtgtttttcaattttttaagggtattttaaatataggatattttaaatataggtaaatataaacaattctataaatgtgtttttcaatttcttattaattttaaaatattatgtaagattttattaaacaataattaaaacactgtgttgggttttaagattcaatatataatgacaaaattgcatgagagaggaagatatattggagcaaagttgccatgttttaccaactctaagttagtatttttctaaactatatggtgctaagttaaggtgcatatttctatcattatcccaacagactttataaatagaaattgaataacttattatataattcaaaggacctacaatagccaatacaacattaaacaaaagaacaaaatacctgatttgaaggtatattattaatgtaaagctacagtaatcaagagagttgatatagtcataaaaacagataattcaatcaatgaaccaaagtagatagtcaaggaatatacccacacatacatgggcaactgattttcaacagcagcacaaaagtaatttaacagagaaggcatagtcttttcaacaagtagtgcttgatcaattagatatccacttgcaaaaaaaaattaaataaattgtagatccttacattcactatgctaaaaacttatttcaaatgcattatagacctaaaatgtaggaacttagactataaaaattctaggagaaaacttatgagaaaatctgcataagcttggttaatcaatgagttttatattcaacattaaaagccataaaaagcttgacaaataggatttattaaaattaataacttttgcatttcaaacaatagctttaagaaagacaggacagaaactgagaaaaatgtatttgcaaatcatatatctggtaagacttgaatagacatcatacctaaaaagacatctatatggccataagcacatgacaatatgctcaatatcattagtcattagggagatgcgaattaaaatcacaaagagatacacgctagaatgactatagtaaaaaagacagatgataccaagagttggaaactagaaacttcataccttgctggtggaaatgtaaaatggtatagctactttagaaacaattttttagtttcttaaaaacttaaatataaagtttccataaaacccagaaatttttgtaaattcagtaatctacctaagagaaatattaaaacatatatccaaacaacaacttgtttgagaatatccatagttatattcacaatagccaaagattggaaactacccaaatgtccatcaattgacaaatgcataaacacaagatggtatatccagtcaatggattacattcaacagcaaaaacaatgaactgctgatacatgctacaaacctagtgaacctgaaaaatatattctaagtgaaagatgctaggtgtaaaagactacataatgtgtaatttcatgtatttcatttatttcatcttttctgaaaaggcaaatatatagtcaatagattagtgattgcctggggctaagaaatcgaagctgcaattgattacaaatgggctcaaggaaattttattgtgtgatgggcatgtccaaaatctggattgtaatgactgttgtacaactttttaatgatttaaaaatcactgaagtgtaaacttttaaaagtctaaaatttcattaaaattcaagaaaacaatttgaagagttaggggtataaatatatgccactatataggccactcttctcatcaggaataataatttgttaaaaggctgaatgccaactgttcttgaaatgctatggctcctctacaaggaacacctttcttcctacctccccccatctccaatcctatgctttcttcagtaatcatctccacagcccttcctgaactctctgattagatgatcataccattagttcccaatagcactttatttgtagttttcttcttacattactcattctcttctctgtattataattaagtctttgtgtgccttatcccttctattgtctctttctttttgagagcattatgaggacaggaaataagtcttacttatttttaaatacccagtgtgttctaggaccataactgacatgtagaaaatgtttaaccaatacttacaaaattaataaaagcatcacatttacataggttatgtatcatcataaacagccacacagctggtgcctttcccaaagataactcttcggccaatgtcctgtggcaaaaaataagtaactgccctcacatcttccttcctactcccagacaaaggcaagtgctggcagatggaaggctttactttctgcaagtgtaaatctgtgatcagcatctcctttgtcatacttccttggaaagatttctgaccaccatttaattatgagttcaaagaaacctgaccctacgtcaatgacatttccaaacaatcatcatgctcatttataaatcatggagtgtgtttactcataggtcttgagactgtgtacaatgtacataatgcccatgcaagctcctctgaaagatattaaaaatacaaaagacaagagtcagcctgcctatacaagcttacccgccatcttcttgagagaagaaatcccctccctggaggcagtaatgaggaaagtggtggtattgaaggttgtagtttccagccccatttctggcatgatactgtgggaacttaggcaattacttaaactctaagcctctatttcttcatttgtgatgtgataagaatacaggatattaatgtagatccccagtcccttatctgcaattgcaaattccagaaatctctcaaaacagaattttttttataacttgtttgatgttaaaacctgacctgatctgaacttacttgaactgatataagactatttatagtcttcatctaatcccacttaatgagaatatccatacttttggctgaagaaacacaaatatgtttgattacaggatgctagcctagatactgatagggacaggaggcagaggaattctagggagaaaagggcgggatccctggtgaaacccttaagctgaaaagcctgagaccatggcccaaagtgagaacttatatccctgttttctcactagaatgttgccttttcctaaaccacccatgaccccgccctaccccatcctgtgcctataaagaccccagactcagccagcagagaggaagaagaatctagacatcgggacaactatggctggatgttggagagaagcagcttgacttcagagggacagcttgacagtgtaacttcagaaaagaatgccagacttcaggagaagattacctatatcccccattcccttttcagttccctttcccactgagagcaactttcactggcaataaaattccccacatttaccatcctttaattctttcatgtgacctcatttttcctggatgccggacaaaagtttaggatcaagtacagatacagaagggcccactgagctgctaacagttaacctttctgaagatggcagagctaaaagagcaccgtaacatgcccactggggctgcaggagtcacaggcaccccattagagactgctgcagggccggcacagagtttgctcctgctggtgccccaaagcgctcaccccagctcctgcacccactcacctgcacactccctcccatgaggggtggagcacagcgggtctgagtgagtggagatcatccctgccagtgctgaaggggccagctggttccagcactcatgtactccagttcccacttcatttgctcacacactccctcccgtgaggagttgagagcaacaggctgagtaaatggggcacccatgtcacgagtcctgcaaaggagtcagggaaatatccttcttcaatactattgagaatgttttgaaatgtatgatacatgcactctgttgactttctaaaatctgtacaattctgaatctgggaggcatcgaaccacaagggttgtagataagggattgggagccaatttttacttcttaggtttctggggtggggaggaattaaatgagatacaaatgtgtagtacataacatattgtcctctccccttcccttttctccaactctatcattgtaaaattccagaaaagtagaattggaaatgcaaaatatgttttattcagtgcaaagcgggaagtcagcaaaatttttcttcttcatcactgcatgtgagtttgagaccctctctcccttcacttctggtgtttctgtcttcatcctgtcactacttaatttttttccttagtttacaactgagatatagaagtttaaatattttttaaacatcgcaaaaccccaaggaaagaatctaatcatgtaataaaagaagcacttattatacagggatataggccttcacagttactttcctagcacgtaaccttgagttggtcacataatctcacagagtaccagttacctcatcagcaaaattgagataatgtctgacaactgacagcggcagatgtctggatgaggtcattccttgaggtcactgtcagctctgaaatgtgtgattttgggattcacaagagtcagaggatattcccaaagcctttggatcccagtgtttgggtcaccacctgctttgacagattcatgctaggcccactttggccttgttgagtaagagggagattccttcttccagtagtaatgagtggagagagtaggaggcagacaatggggaagaggaagagacaatgacaaagtaaggctggagtgtgttcacttgaactgagtgagctttggaccaactgtatgttatcaaactgcaaaatgtgcatgcatcaggtattcagagcccaaggagagttcccacatctgtagggacaagaagtgtgtccctggggcttcccatagtgacaaagaacatagagtcattttcaagagcttcttagattattttgctttatgctaagtgggaactcctttgaaattagaaacaccttagagattagaaaatctggactgtaccacttacagattgcatgactgtgagcaagtcatttaaccgtccccaaccggagttccacatatggaaagggcaatgaatacctcgctcctgaaattgttatgagaattcaatgagctaacggatggaaagtgttgcttccagtgtctgtcacgtgatagtgtttaacacaggctagctgtgtagtcctgacaaaaatatggggagttctgaaggaagacggaagatgtttttgctttgtttatttaagaataaaacaagagggtgttacagagaaaagaaaatgaatgagcctagccttttgctcctttggacaaggcatgaaaatatcagcctctctttactcttcaaaaagaggtcatttttggaagctgaaatttgttgtttggaattattctgccaccagtatttatagtggctgtggaatggcatgaaagaatataggcaggtcttaaagtaggctcaaaaattcatcagagaatttcccattgaagagtttttgtgtaaacttctgcttttaattataattttctgcatatttggtctgcattctccattgttatttgagagaggtaacatgataaaacaaaaaggatgtgaaattttacattggaaaccctcacttcaaaccctggcttttatgttgggagtaacgaattagaaaatttaacaaaaatttaatagtgaggaaaaatatgtatgcatattcaaataaataaacttcaaacaaattagcaaataatgttaaaggacatagtacatggatgaaaaaatgattttactagttaatgttcctcacatctcaaaattgttctttcttcctcattatctttgctctcatttcctaaccatgaaatacttttcctctaaatcttcccaaagttctttccctctcttcatttaggtttccatcagaatgtgacctctttgaaaacccattcctggacacttctttcgtatgtgaacacacacattctcactattctctgttttccttcaatttgtatttccttctagttcttataactgtctaatattacagtatatgcttattgcttacttccttgtgtttgtcttcccgcactgaagtttaccaggtatgggactcaacaggctcctaaaagtaggcctgggatatggtaggcccttaacaagagattattgaacagataaatgaacaaatgaattagtgaaagaatgaatgaatgaaatcactagggaaaagacaaccaactgagaaatctacaaaaaatttaaataggtgatgccgagagcgagaaacccacatggccaataaacatgaaataaggttctatgtcattagtaatagagagttcctatttaccacaatgtgctattatttaaccccagtgaaatttttaaaacaatttaaaactagccaattcaaatttcagaggtaatgtagttgtatcaaagcttgtatacactgctggtggagatgtaacttggagaccaaagtggcaatatctaataaaactgattatgctcatcaaaaaaaaaaactgattttgccatttaaaaaaaaaaaaaaagacaaaaaccgcaattacttttgcaccaatctaataacattgtttcctctatagaaactatttcagttatggctatgatcatctttgtagcaatgtctataatagtatacagtcataaaccacccgagtgtccattggcaagagaaaggataaattaattataatgtgatcaagtgatgcagtactgttaaatattagtaaaaatgatttaatgttgagtgacaaggtgaatttacaagcaattctatatatcatttttaaataaaacaagtacctgggcccattacattacattacattaattttataggttcctctgcagaaaaggaaaggagagaggaaagcataacattatttatctgtaattttttacttctttaataattacatctcaggtaatatgataaaatgttaataatcattcatttctggtgatgagcatataagtatttattatgtgtcctcagtgagtttcgtattttgttttattttcccatattaaaaatcaacaaaaataggcaccaaacttactcgtactgtgcctagggcaagttgcttcatcttaagaattagtgtatctatttcctctattttaggttactgcagatactaagtgagctaacacacataacagtgctttttaaactatagagcagtatgttattattacgaataatattattaatattattattatggccatcattaattctccactaatggatgctaagtagaacagcagttttcaaactgtgctctatggaaatccacagacctttatggacctccaaggcctctgtgaagcttcgtgggtgctgtttgggaaaacgaggagacagggcttcaggctttagaacccatttcagtttgaaaagctttaattttgatctgttttcatgttggacctggaaataaggtttccagtaaagaaaatatatatagcttggtggtaactataccttttcacctgttacattaagctgtaagaaatgtcacatgacttcattttttttcaaaattaaattaaatgtgattctgattctacatctgcattccacctggctgctgggtaattcagtatctgttactactggctctccctttctgccctgccctctgtcctctagaatcatgcaagtttctaggggtcttataaagcaaaacctttcaagagaagactgtggcctacagtgcccatggtcattattgatatgctattcatacaaggtgatgtgagcccttaggtcattccgtggatcctgaactatgtggggcacaggacactttcagcagtgagagaacagctacttgggtccagccaaccaaggagaccacacagcaattcccctcagaggacctaaaagcattctagggcaccctgtaggtccccaacacattcccattctagtgttggaacttcacttacccaggactgactacttccacctttaaaggaatacaaaagctggacactttattggaatggaggagggaaatgcagtgagggaaatatacataaattaataatttagtaaattatcttgctatggatcattttataaggatttgaggccaggcgcagtggcttacacctgtaatcccagtactttgggagaacaaggcgggtggatcacctgaggtcaggagttcaagaccagcctggccaacatggtgacaacccatctctactaaaaatacaaaaattagacgggcgtggtggtgggtgccggtaatcccagctactcaggaggctgaggcgggagaattgcttgaacctgggaggcagagattgcagtgacccgagatcgcaccactgcactcccagcccgggcaacagagggagactccatctcaaaaaaaaaaaagatttgaaatttctgacctagagctgtatctccctgagtatcatttggttttcttttcactgtgaagtctttttattaaaatcaaaaaatttcgaaatctgactctgccccaccccattctgacatcctcaatccctgctctgactgccccagcaatcttttgtgccctgtgattgaggaaatgcggagacctgtggactcataaaggctggttccaggctggatgccctgcactgcatgtaggtggcccgcggccattactcacctggaagaagctttttgttgtaaatcttataatcatcttgtgagggtacaattatatggggtttttgtgtgtgttcaatgttttagtttagtttaaaggttgatatttaaatatgtcacaattggtgaaacttctttttgacattttattttttaatatatctttgactgaaaaagaagtaaagtgtttaccacttgacacctgagatttccctaagtatgtcttcatcaaaagggattggaactctaattggattattgcttttgttctcagcctgggctggtcagccccagtgctgcaccccagcaggcccggcgcagcctcgtctggtcagtgagatcttccctccactacccgaggcacacacagttcagtcctgagtccaggaggctgttcctcaatgcaagacaaatcagggtactttacagctcttcccagactgtgccatcccaaatgattaacttgtggccaaagacacagcaaggtccaacctaatgcattagtgggttggaagaggccaggggtgtctcagtgatggagtggcctgatgctgtgagaaatgctccatatgtttcagataatctgaaaagaggtgcagacatttttgggctctccaaaatatgcatctagggctgaggagttttagactctatgaatagatccaaaagctgacatacatttcagaccgtgtaatacaaaatgctaggaaacagcaaacttgatctgaattccctcccctccccactcttctcctgcctgcctgcaagctgtgtctcagtctttatcttacacgttcactgtgactttttttttaattgacagggtcataagttcacttctgatggagaattactcttcggcccacttgcttaaaatatatttgaggccaatattaagagcatagctgtactcactctgtaactggaaaagaaaaaaaaaattctggagcccaatttggaagaaagcatttgaaaataaaacaaggaatattttcagaggctaatgctcctggaatttattcaagtggctgccatggccattggcctcaagaatgccaattacagatgctctgctgtctgattagagcattcttgagtccagagcagtacattaagtcaaagggtaagtctttgaattctgcaatgaatttgattaaacatttacaattatagagtgattttaaaacatcccagaatcatcatcaatcttcaatccaggtttaagaaagcaaaatatctgatgccgagaactattttgtggctgggatggtttcctgaaaaagcactgtagaaaacattctgctaaaacttttatttaacagctgtggtttaggcatatttagagttatgtaggcctcattggataatgattatgggaaccacaaatattaaggttttgcaagatcatttttggtacaaaataggaaattgcccaaattttggttaaattatgaaaatgtgggtctcaaaatttggctatacatgtgtgtgtctgtgtatgtgtgatgtgtgtgtgtacatgtacatcctttagttcatcattacctgaaacaaacaaagagatgattttttcttctggcaaaaagtccttgaaaaacaaaacctattattttctggttggaattgagtttcctatccagtacttagtttaaagtattatagaaacagaagccaaatcacacattgtcataggttcagatcaacatcacttctgactctagatgaggttgaaaatttcagcctaggaaacacctccttgatcacgaggcagtacaggtttctgaaagtaaaagccattgggtcagtacaatcatctctgcattagatgtcatccctagggaataactacttctaaaatctttcttaaaatgtgtctgtaatagtggctagtttcctctgatcaaatgtatatcaaatgaggtttataggttattttcaatttttgaaagactttatatcagctatttttatataataaattatttgtgtattagtctttgtgatttttttgaattggctattgtaatataacacaaatacagaacagtgccttaaattcttttataatcattttcctcctattgttggtgttttgaaacaaagtgttttattttagatggcagcttctgtattcggcacagaaactgtgatagaccctggcccttcctttatgggtctgcctctgccaccatctgttcagaaattacctgccaccctctcttctgctttccttgatagctggggtcagccttcagaaacaggcatttctctactgacatattaagaatcaaatcacatgcattctcacacatatacacgcaaacacacaaacacatatatacaacactttcttccaatacaagaaaaatacaaacacagaatgtgtactactgcttttccaggaaatcttaacctattcagagctctggaattattatttttaaaaataaaatatttattcaagcaaataaatcattaatctgttcaattaatgtattttgaacttttgccagatactatgttaggttttaaaggtgaaacaacatcgcatatgcaggctctgtcctcatggaattacatcctaaaggtaaatcaaaccagagcatttgaaaaaaatattaaatattaatatttttcaatgcttgacacttgaaaaaaaagttttatttttaaaagcaaattaatcactataacaataaatgttctctgtgcccggcagtttggtaagcattgtgtgtgttacaaagaaataaaagtgtaagactaggtatcttaaactcaggaagaaacaaccagcacaaaatagtgaaggcaaaagtgaatttgtaagttaaattagaaaaaaaaaattcaaagttttgatttaacaaaaaaatcaacagctgaactgaacaaagtacttaattaaaaacaaaataatactcaagatttgttttaaacaactcacaaagtgtttattctccaaaaaaaaatcagaaaataagctaaaacaaaattaaaccttataaaacaggcaagatttagtcacaaaatgcatgctaaagaagttattcaaaagttccagaacatagaattatttttacatgacaaacttccgttgaattaaatactgatcttatattcactctaaagtggcctttacgtcaatcagttaagctctatcatttctcccttgggaatatcttaagaaatcatcccattttgttcattccctctgccaccctgctagtccagatgttcatcttgagtctcatggagacaacggtggtgcatcattgctggtctttctttctttcatctctcatagttaacatggcattaatcttcctaaattgccactattaaaacatgtcccatgctgaatatcaatcagctggactccttatacctaataagccaagtctaaacttagcctggcttgaaatttccacaggaatcacccctgcctcttcaactttatttttcatctgtcccagctatcaacactcaatcttatgatgttgacatctaaatgacatggaagtcactttatcctactccatacatctgatttcaacatatccctcatttctgatgccatctgtaagtcaatatgtctcttcagtgcaagcccatcaaatcttctgtgacaaagccagtctaccctgggctgttccttccacaagactttgatttcccacagagtatgccattttcataagattgttgttatttcataggatccaggcaagaacttcttctctgatgtgaagccaactgggtttcaactctggttttgccaatgcttattgtgtacctctagaaaattcacttgacttttgtcatctgtaaagatgaaaagaatattaggacctgtaaagttggtctgctgtgcatcagtaagctctgtagttgttaattatctttgttattaacaagaacttgttggattttgcaggctggtctgagacttcagattgattgtcctcatccagttatgacttggctcttctggaattgaaagggagacctcagctggctggtctgatacatctaccccatcagtatcccaggtcctgaattgtttctcccatttggttgaaaccaatgtggagcattgatataaaattctatatacacatcaattgaaacaactctattactttttcaccccaaaagggaagcaaattttccctttcaaggctagagaaccctcagcaagaatttagcggaatcttgtatgcacaagtaaaatgctgagaaatcccattcatgacaaaacaaggcatttctaaagaacagttatcttttgagaccaaaacattcctatgcagagacataaaataatattaccaatttaacctctacttatttgtgccataatatataatactttccagtattgctatatgatgttcttacatgtggcacatttaaataaaacaattattgactaagatctcagttcttttggatagagcctgatttcattctcaggtctctgctatctcctcatttccccacattattaagaataatcaatactcctaaagtagtttttgtttggtcttatttgggtctaaatacactaatctacctaggaaatgactgatcaattttagtttgggccaaatcctggctcaaattgtaaaaatcaaaggattgtcagctttttgacacaaaaatgcaatgccacagtgtttacaaaatgagaggactttcaaatggtgtttgttaagttagacctataaagtgaaaccagatctgggatcagatcactgagctgatggaaacaagggcatcagggacacaattgtcatttcactcattgaaacaaattaatcgcatcaattatgtagcaatctattccactctgtctcttaattcttttgaggttgctgaaacaggatcagaggatacatggctttctcccaacacataacctttctgaaacagaggaaaatattctaaagtggttaggcagggagggggtagaaacaaagtcaataagagactcaagggtgagtcatagctgaagccacagtaaagcccagatatggggtagggtgagggcacaatggtgggaaggtgcaggaaggagcagcttgaatgggggctggctagtataagaagtctgtcatgcctgtaatcccagcactttgggagggtgaggtgggcagatcacgaggtcaggagatcgagaccatcctggctaacacaatgaaaccccgtctctattgaaactacagaaaattagctgggcatggtggcatacgcctgcagtcccatctacccgggaggctgaggcaggagaatcgcttcaacccgaaaggcggaggttgcagtgagctgagattgcgccactgcactccagcctgggtaacagagcaagactccatctcaaaacaaaaaaaaaagagagaagaagttggtgctttcacagtaagggctttgagtggcattcaggtgatctctttaaaaaatcaataaaacattgtggtatctctcctttttaggtatggaagttggatgagggcatgcaactttaaaaattaacacaaatgcacatgtagtaggtgctctgtacatattatttaaaaatacagaccatcctttctgctccccagtcttactggtttggctggaaaaggagccacgatagagaaaattctagatttacccaaatgagacatttgcattacaaaatatttttatatgacaaaacgactcacaatgatattcctttaaattgaaagttcctgacagcattactaattgaccatgatttttcttttaagtttcaggaatcaatgtattgcctgcacttaattttaactgaaagctaccttgtataatgttcagaaactatattggaatttatctttaaaatgcagagtgatggagctacagaactgaaataaagagaaaccaaaatgatttgttaagaaagaccacagtccaaatgcagctgaccccagcacatcttcccatcacaggtaaaggaggccaaggaaacccccagtacttgggagtgggggctagagcaggatctggtgctaaggcaagcccataccccaagtgaagttgttgatgattgagtgtggtggaaagacaggtggggtggtctgatcagcaccctacctgtgatgaatttatctcagaacttggctttgctgtcatcctgcatggccccaggtaaggaatgcccttgtctgagcctaacccattagaggcagctcaactgcactaaatcactctattcccagaccagcggtcactgaggcattcattctgctggcaaatctaggattgaattagagaactattaaggcctcttacagtcctgtaattctaagatttcttttattcaatatttactccttggacccgggctaggcactagcagaatccttccaggccaggttttctctggcttggtaaactaatcctctttaattctctgtccagactatgtcttccaagccttttcttcattgcttatctatccagaacaaaatgagccttacgcggctctcggatctgagcagttagatgtttccttttgttctttgagcttttgttgcttctgcccatattatatatgcatatatgtttgtgtacctacagaaatacatcttggtacttatgcacacatggaatgcttgctattacctacagaagaaacctgctgtcagcaaaagcattagttgtgtttctgtttctgtttctattccccaagctaggatttttgtttgagtaggaatttgtgccttaattataaacattagtaagtgaaaaatgtttgcatttcacaaatatattttctgtttcacaatcttcatagcagaaagtcaggctcatgaaatatgatatttacttgcataattttctctccttttcccctgatattttgactttaacagcaagggtgaagaaagttatgcaagcatatggggtcaccctagcaatcatcattaatctttgcttccctcatccttgtttactagaagaccaagctaaattgtacctggactttctcaaatttttccacagcagtgtttcacatttctgaaaaagtcactttcagcaaaagatggcagaaaaggcacatggctgcatgagggcctctgataaaaagagataatttgcaagtgatgggaggctggaatttatggtgttcaagatgtgttttaagctgggacatgagcatctctaattcaagagaagaggccagtggcttgctgcaaaattattccctccctcgagggactgaaggtgccctgggaaagggccttatgcctcacagtccagggaggatggtgggagtaggcagggagaagtatgagagggaactggacagtgattgaggaatgatggctaaaattagtttttgctttccctcccttaccattagcagacagtctgccgctccagctggcttctcttgaagtcagaaagttaacctgttctctgcctcagcaaggacaaagcgtgttctattcttgcctgtcagtgtggttggagttttcaaaagtgaaagggaagatatgtgtaaaaaaatgtcttactgatttttcttttcaaaatatgcatgtggaagaaaatgtaggtgccagacattaaaatatagtattctcatgtttattacaccaataatagcttaatttgtggagacctttatagatagtaacagtgttttaagcactttggatgcatgacattattttttcctccaggtaaccttctgagatatgcattgttgttatcccaaatttacagatggagaaagtgagctacagaggtcacttgcccatggtttcctcattagtatatagtggaacagggattctctgattccaaatcttgtgatcttaaccatctcattgaactatctcaattcagctaatgagtcttacatcaatgagacttattgaatgagtgaatataggaaaataaaattacactgcataaagtaggtacttagtaaatatctgtggaagaaagtttacccttgttctgatcatgagtcaaatccctatttagtgtctggtcttttgaggactactgttccttcagattttgtgtttgtttatgtgcgttcacatggacgtacaagagcacacattgactaaactctaaaatctcaactaaatggaactctgaaagatctcagctaaattgaactaattgatctaaccaaatgatctatgtataatagaaaacgtataataacacttccatgtctttataaaagttggggttaaggatgcttctcaaagtacaatctaaaaggagtaacacaaatttgtgaaataatcaaaaacagaaaaatatatgccacctatatggcacatgtggactccatttttaaaattccaatatattctacctgttgtgttttgaggaaattctacctgttagagcattttatggatgtgtacctatgtggcatacattttcagccatttgatataactaaatgatctatgtgtaatagaaaacaacatataataacacttttatgtctttacaacagttgggattaaggatacttgtcaaagtacaatctaaaaggagtaacacaaacttgtgaaataatcaaaaacagaaaaatacacaccacctatcttgcatatgtggaccccatttttaaaattccaaaatattctccctgttgtgttttgaggaaactactggtcagagcattttctgaatgtagggcaggtgttctcactgtggtgtacatatgaagcccctgggtacttgggcctcacctctgaaagttacactctgtaggcgtgagttgagtgtccagaaatctgtatttttttttttttttttttgagacagaatctcaccctgttacccaggctggagtgcagtggtgccatttcagctcactgcaacctccacctcctgggttcaaacgattctcctgcctcagcctcccaaggagctgggattacaggcacctaccaccacgcccagctaatttttgtatttttagtagagacggggtttctccatgttagccaggctggtctcgaactcctgacctcaggtgacccacccacctaggcctcccaaagtgctgggattacaggtgtgagccaccacgcccagccagaaatctgtattcttaatgagaaccaagctttgcaaagagttgatgtagttaattgaggaaatgccctatgttaagaaggactgcttctgtttcctctcccaaggcaggaaagtaggcctctgtgctttgcttcataaaaccatatgcatcattttgcttgtattaaataaaattttcactgcattcattttgcttggtaagtggcatgtgactacagtacatagtaattacatgttcctgaagactacttggtaatttgcacttaataagaccaaaaataattatcctgtactccaatctagaaaacataaataatcgtaaatatatggtactcaccatgtaattactttgccactccactcaactctccataagattgagctattactgaggaagtaaagaatcatcacaaaatattccctattttgcctgataaactaaagcgactcaaccacaacatttgcattttcagacacattttcgtaggttcagaatttaaatcagaaaatttaaaggaaagagcattcctgagctctttggggactttctgatttgaccttttacgtagtagtgctagaaaatttctctgaaatttaaacaattttcaaactctttaaaaatatgacataacccacctgtctgagatgacctttcaaagctacttctaattctgttctctgagttagtagagaatgattaaattttaggtctgagacacacttatatggagcggagggacaggagctagcattccccagacaatcttgcctgcttacatttagacttgaggttcctttcttcctaatgggatgagctccaaaagcctttccacataacactatgctccatgtagggtttccaggttctactggcatccatggtttttcacgaactctgcaaagcaatcgatagttaaaatcatgtttttgtaatgaatacagttagagaccttctcccatgactagcaaggtgcaaggacctaggtagatatctgaatcacctgcaatagatttgttttgttttttcatgtttgtggttgtcttcacaagcagagtattgttgaaacccttcttattctattacctctcactcaccaacagcaactaccacatcgataaagattactatagccattgaaagtgtatcactaccatgtgcaaagagaagtatgtcgaaaaaaaaacccattcattcatttattcaacaattattgattaaaagcccactatgcaccaggctgcctaggtgctgggaatatggcaatgagtaaaacagaatttccctgatcttatggagattaaattcaagtgagtggagcaaacaaatgctatcagatcccctataatgctcactttgaaaacatgaatttgttccagtgcaacttattagggaacaatttgggtgtaatgtgaattttgtgtttgcttatgcatgagttgtccatgagaaacactgcaaggtagaaaactgcacccagctgaactgagtcacataggaatatacagagtggacatacttagggatctaccagcttcctcagttctccatgttgttatgaaacacatccatctgcatctggtattacaactgttgatccattttcacataatccttgttctatcgcattacaatcactcacaggctgcaacccacccctgcctccacaagcaaacttcagatctttttcagggtacagtagtatttatgtatatactgaccacttaacatatataaaactgtgctattatttttattgttgccatcttttcccgtaacgtgtccctgatgaagtttttgcatgttgggcccccaaccctattttctccataagtcctgtggtttacattgtgcaatttcatgtgacatagtgatttttaggaacacatatgtcaccttatggcagaactacatataaacaagcaaactgccaaataaacaagataattccatgtaatgggaagtagtttgagaaaagtaaatcagggaacatagctgaaagtacctggatggagtgggaaggcactcctttagatggcgtagccaaggaggcctctctgaggtcacatttgaactgacacctgaataacaagaaggagatagccatgcaaaaatctagctaagagcattctaggaggagtagtggtgggatttgtgggggtaagggacgcaaaggtcttaaaccaggaataagcttcacatgttagaggaacaaagaggaccagagcaaaggacagggggttgggaacagtagctggtttcaactcatgtagacatagaagaacattgtaggtcataggaattttagattaagtgtgatgagaagccactggaggactttttccactactgattgaagcacctgctctatttacagatgagtatctgaggtctagagagtttatacttcatgcccaaggtcaagtctccagccagaatctaggtctcatatcttttctcatgggaatagatatacacatgcagccattcctagatgaatccttcatttgaactctgggaaagaggatatcgattgggaaattttcccagattgtcccaaaacagattctggatccattaaaagcatgatgatattggacagaagtccagtttaatcaggctatgtccaatgtcctgtttcattccactggtgagagaaaaataggccagataaatgccactaagccatcataggtgctagcaagatttgtaagacagccagtcttgcttaagcaactgccagtgcccagaccaccccgaggggtgcttttgaggagtgcaatgatgcagtcagcggatgtccagagtgctccttgctttctcactaactgacatgagacacgaggcatgagaatctcttgacagtggattacgaggccacaccatgagtcccacaactgaaagaagttgtagaatttcttttcttagatggattgacacttgttctttatcaaagccagtcggaagacaaaagaataaatttaacttgacaataggctaaatgccacagggtaaatgcctcagcaaaaagcaggctatttggggttctgctctacactaagcaaaagaggcagctgcctatagggtgtggtgtgaagaggctgctgggtgtcttgtgagggtctggagcaggtggccctgtgtgcactgcccacagccctgagctcacacatcccttgctcctcagtcctgcagtcctgcctgcagccctccatgtctcttgtctctagaagactggggaggagacggtgggtgatgaggtactaaacagtctgtgattctcaggctgagcttcaaagcatgtcttcccaatcccaccccaccctcagcctgccagcctctcaagggcagcgcaagatccataagtgattcctaccctcagctacatacttgttctccactgcctcattccacatctgcataatccagaatctttcacgtagacactgctatacctttatgccttttacaaagctatatcatttgccacaaaatattgccaagccctccactcccacaggattccaggaagcagggcaagcccacattcactcattcatcaaatcagcacatatttactgaatagctaatgagagctatgcactattctcagtgctaggaattaatctatgaataagaaagacccaaggtctgccctctggacctcctcctaggatgtacatccctttggccatatatctcaaggatggccctaagtccacttcagcagaggcagctgtgacacctgctaaacacgtgagttccatggcccactctagaccttttgtagaaactgagtttctaggatggtgccttggaatctgcactttttcaaagcttccccagtgatttttataaaagttaaagttcaagaactgctgctccaaggaatgaatgaaggactgtagctggagaggttctttctgctccttagagtctggcctcagagcaaggggcatcttctgctcgtgagaccattcaaggatgttctctggggattctgtgccttataggtagtcagggctggaagttgtttcggtcttggatttgaaggcaaccacaaagccctcaccccaacaggcggtctccaggagccacgtattttatcaggattgcgtcctttgtgcctagacatggccctcttttaaaagtagtcactcctaggcatggcttggcaataaacaatgaccagttatttctacctgagtgtaaaccagggctccataccccagctgtcagtgatggcccgcagagagcagacatggataggaatgggaatgtgtattccaggacatgtggccaagatggcttacaagtcttctgggaaaggggaagcgtgacagctgtgacaacattagggcttgggaggagagcaggggagaaagaaggcagagagtagccagaggtcaaagaggttactgggagagtcgggttcttcttcacagctttgtctgcatcctgatctactttagactggatgtctttaggacacaatgagcaagtgcagtctccctgtccttctcccactgcaaccagctcacagcacggatcccatctatggcttatccacaaacacttcattatcacctgcccttgccccagccctctgcactagtctgtaaacttcttgagggcagggcaagatccacatgtgatgcatgtttgccccccacactccctaacagaactttcatgtgtaatgtgctgaataaatatttgccaaagtaaccccagcactttgggagtccagggcagatggatcacctgagttaaggagttcgagaccagcctgaccaacatggtgaaaccccttctctactaaaaatgcaaaaattagccaggcatggtggcacacgcctataatcccagctacttgggaggctgaggcaggataatcgcctgaacccaggaggcagaggttgcagtgagccgagattgtgccattgtactccagcctgagcaacaagagcaaaactctgtctcaggggaaaaaaaaaaaaggagagtgaatgaatgcaaattgaatggatggaaatttgcggaggtcagagcctggctctgcctgatttattcagcccctggcatagcatctcatgcaaatagccatttaatacttgtgtttgatgatcatgaaagtgataataaaaccctgcaagggatgattgaggataaggctctttatttttggtatcttttgttggaaactgccttaaatctgttttagaagtaggcagggtacaaataataaatgaatgattggatgaggctttaaacctctggggcctctctagactttccatttcctctcatacccccagggcaaagcagccttctggggatggaaggtgaagagaattttttcattcatgcatgtattcattcaacaaataagttttgaaaaccagaccatgcttctcttaagcaatcaccttgctccagggtttctagaccaagtgacttcttgaagtttctttcaaggctgtgattcttgattctactcagaaaaggtggggatattgaggaagtgatattgataaggccccacaggcatcggagatttagggaatgtatgaaggcagcaggtgtccatcgtctttctgcctatcttaatacaaaagcactggtgaaattgctttaatgctttgtttggcatctgtttatgtcaagtcagatcttctcccaacatccaaatgaaacctgatgtgacctcacataatacagcagatgtgtcaccttgtaacaaaccctgcacaaaggtcttacttgacgtttaagtgcatcaaaatggaaattatatatgatcagatttacctttcctaagcattttgcttctagtggtacctaaattataccagttgattaaaataggcaatcaatgtctgcctgttggtggtgtcttaacttgctatatatactgttggtaaataccacaacattattttaatctgtaaatcggatttgtcaggtctgatttatttaaacggctctcatgtcccaaattctctctgacagccccaatatgggagcctatcctcttcttgaaaaggtaatattgcctggggcttgttgctaccttaatagaggcaaggacactgtgtagcaagaaataagagaaagacaggccaccttttctacaacaagtttctgcaagcctccaatagctcaaccaagcagcgtcttttcacagaaattaggagagtactaactgatctaggtgcgaggccaaacacatattatttatgtcaataatactattgataacaataacaaaaattgatccatcatttactatgtgctatgcactgggctaagtaattttttaaaatgtattatcctattcaattcctacagcaacccccataagcaagtactattttatatatgccaaagctcgagttgagaaaagtttagaaacttgctcagatttgtctggcaccagcctgcagccctaaccaccaggcacagacacacagcctgtctccaaagagttgttatgattaactggctttttaaaggagggatgagactatgggggaccatttgttcaagattacattcctacctgagaccactgtggttccttcaaattctgtaatactcacttcaataaacctgttaatttgctgtttctcagccttttaaaatgagcaagtctttctacaattaaataataagagacacttacttttaatatttattacacataaaaatgacaaaaaggtgccttttaaatgagttccattatatgctgtttattatggcctcttagatgtattttcatgatgtatcccttatttagtgtacaaacagtgcttagcaggcaacggaattcagggacttcttacaagaagtgataggggcctattagaagatgagagccagcactttaatttagaagatacatcaaggatgccagggaaaatgccaagaactcagaaatcatggtcttgcttcatgtcgtttttgtactgtagggcagtcttggttgggcaaggcagctaacttcagtgagccttaattaacttatttttacaaagctataactttttatctacttctcagattggctaggaagaccaaatatggtcctctctttcatagtgctttgttacacaaatacaaataaaaggtggttatattatccaaatggtctcatatcctatcattatatacagaagattttactttcggaaaccaacagcattttacaatggagttctatgagtaaagcgccccccataccccaacagctggctcatagtaacagtgatttgtggaattaaatgaattgtcttcgaagaaaaatcctgtagaacgtattcacaagttccaccccccaccccacccggcagccatcagtctgtaaagaaaattctgtttccctacttattttttgctagaactgtatttaaatgtaggataagattttcaaaatgaaatttgacaggtttttttttttttttttttacaagacctgtctgtgtttgtcttcagctctcttctccccagggtgtttccagtgggctgggaaggctgccaaagggtaggctagaggctgaagtctccagggagtctgggtttgaggaaagagagagaagagttattgtagtataggagcagcagacgggaagaaggagcttcagcattcgttgatgggcccaacctgctggaggaagcctctttctggggctggaggagctttcccagcacatgggaggagcaaagctgaaggaggcaggctggctgggagtgcaggagggccctgcaaggccccctctgccctacctcaccccacccgtcacggctctgtcctgggtttcaaagtggtcccatcacctcctctacacttcttccattcagacagtcccttgtcttgtgtgccctggctccatcttacatttctgctgactggagggtccaaactagtctctggtcccacagcatttcagacctctctgaagagcatgattcattggaaaataaagaagccctaaatctatacatatcttctacaactgtgagtcttatgttgaaacccttacagttgtttagggttagttatagcacaaataagaaaaacaagtccactatatatggtgcaaaataaattctgccttcagtgatccgaagccagggctggcacatgttttctctaaaggacaagctagtcaatatcttaggctttgagggccatacattctttatcacagctaatctaccctgtgtttgtaagcagccatagaccatatgaatatagcggtgttccagtaaaactttatttataaaaacaggtggtggggccagagattgctgattgctggagcaataaaaacattttttactttttctttcttttttttttttaattgagatgtcactttgacatttcggatttcagtaaatactagaaagcctgaatctcctcccctttctccatttgcattgtcaggtgagctcactgttgtagctaaatgagagttgagatggcaacattgatttactcagacagttgccatctctctgaaaagagtggctgggaagttgcgtgagtgcagctacttctacaggaaaacacagaggaaagataactggatgcctaactaatgaagaaattcccctgacactcatagaaagactgagcagaaagggccttttctcactggctccctcccacgccctatcccatacacactcctagtccctctaatgagagttggccagcccagaggatcccacaaaggactccagccatgaccccagtcatgtctgtcctctcactctccaagatttcctgccccactatccttcctctgcagagacattgccttttcagaggggtaattaacttcagtgaaactccagcaaggccatttgtctaggggacagaattgtagcctgttctgcccctatcttttagagagtagattaaactgacttcagcagagtcaaatccctggtattagcctttcagctgccccctccttcacagacagagccacaggagctgcccgctcctgcctttcctcttttgtaagccatgctcctcagactccgtaaaaaaagagtcattacttggagaaaagttttgagttagcataagaactgcacacatctgaaaccacaaatcacgaatttgagactacagagagcctcccttgcaggcatttgcaattgcagtttgaagaccagccatctggatgttgtcttaaagtgtgagtctccattgtggctccgtctgtgaaggaaaaagtaaagtccctggaagaatttagagagtgggagtaggggtttagaaggcagttacacttagacatgactagtatttcctagaggactgagttttatagtcccttagtaataagcaaagagccgaagagagggtttgtcagtcacaaatgaaaagcagtggttctcgatcagggcagtttgtctgccaaggggacacttggcaatctggagatgtttttggttgccacaactgtcacaatggggaggctgcatactaatggcatctaatgggtagaagctaaggatgttgctaaacatcgtacggtgcacagaacagacccccaacaaaggattatccggcaccaaatgtcaatagtactgaggttgagaaacactgaatgaaaggtgtttcatgttctgagcagccctccgctgtgagtagttaaaccatgagtggatatgccggctgagtcacatgagggtcccctcccggcaggcttccttcagggtgtgtgcatggctagacagcagagggcaccactcccaccacaccacctccattctggtggcaagaaagggtacatggatgggaaatactttcatgtttcttcccctatgaggtgctattttttctaacaaatgtaggtaagggggcatgtctccaccatgctttgcatggtaagggagatggggcagaaacagtctggctccaactctggcaggccttcctgttcctgctccagcccctgctgactctgagtgtgagttctcccctggatcctgctgacaaagcaagtgtttgccctcccagtggtcctctccttggcctgctgagccatgggctccttggccatgtttctcttcctctttcaatccaatcctacccactttccatctttaaaaaacactccaagtttctagtctgctcatgtccaccttctttgctttatagggatttagtgaatttattcttgcatacatatttccttggtcatttcaatggactttagggaggcacagaagtagaggtattggctaagggatccctcgagaacagcaactcatccactggattgaacaccaggacagtcactggtggccttacaagagcagcatcagtagagtgtgttggcagaagccaaattgtagtaggttgagtagatttgagtaaagaaaggcattttggttatctatagctatgggacaatccaacataaaacttagtggcttaaaacctccatttattattatctttcagagtttttgggttgattgggttcagttagatggttctagattggggtctgtattgggctgaattgttttcctccaaaagatatgttgaagtcctaacccccattgcctcagaatttggccttatttagaaatagggtctctgtacatatgcacacgtatgtttattgcggcactattcacaatagcaaagacttggaaccaacccaaatgtccatcaatgatagactggattaagaaaatgtggcacagatacaccatggaatactatgcagccataaaaaagaatgagttcatgtcctttgcagggacatggatgaagctggaaaccgtcattctcagaaaactatcacaaggacagaaaaccaaacaccgcatgttttcactcataggtgggaattgagcaatgagaacacttagacacagggcggggaacatcacacaccagggcctgtcagggggtggggggctgggggaaggatagcattaggagaaatatctaacgtaaatgatgagttgatgagtgcagcaaaccaacatggcacatgtatacctatgtgtcaaacctgcactttgtgcacatataccctagaacttaaagtataataaataaataaataaaaataagcaaattaatacacaaaaaaagaaacagggtctctgtagatataattatctaatatgaagtcataatggagtatgatgggctgtaaataccatatgactggcatccttgtaagaggaaggagacacacagagagaatgccatgtgatgacagaggcagagcttggaccaatgcagctgcaatccaacgaataccaaggatcgatggccatcaccagaaactaggaaaaggcaaaggaaggattctacccagagttcagagggaacatggccctgccaacaccttgatttcagactcctcacctcaaaaactgtgaggaaataaattttttctttgtgagccacccagtttgtggtacttgatatggaagccctaggggactagtacagaatctctcatacaattgcaatgagatcttgacatgggctggaattaacttgtcttagtccattcctggtgctataacaaaatcccttaggccaggtaatccataagcaatagaaatttatttctcacagttgtagatgtagggaagttcaaggtcaaggtaccaacaggtgcaggtgaggactttctccctgcttcataaatggcactttgttgctgcatcctcatgaggtgggaggaaagcaagggcaaaagcaactaacagactccctcttgttcttttattatatcagggcactaaccccattcatgacatggagctctcataacctacacacctcctgaagtccccacctcttaatattgttggattggggattcagttccaacattaaatttggaggaacacaaacatgcaacccagtagcacaactgaaggctctatggggctgtatgtccagaggcttctccacatgacaggtgcttcatctaggatgataagaactgctggggcctggctgtacattgttctcttgctccttgcagcctttccacatagccaggtgtgttggacttgtttacatggcacctagcttcccccagagcaagtgttccaggagacccaggtggaaggaacaagacttctattgacctaagctcaaaagttacacagtgagagaggggctatgagaggataggctccagaatttaattagcaggttaagcctgagactgtaggaaaaacacctgtttcattgtatcaggagagaagcagattaggatggatagagacacagcaaatgtgtggatggagaatgacatatgggagtgagtacagcagcttcaggatgttgagagaattttcatatactggcatctagtgtctctgtgtctgaagaagcaaagttatgtgctgacactggtaagaaagaagtgtggtaggagagagagcttggggagaatgacatttggaaagagccacagtgaagaatgggaaagtgagctaactacggtcacatacaccacaagaccccagcatctgtcattgttaaatgataaattttggaaaggggaatgagagtgaaatcctgggggagcagttgtttcctgctgtcagtggcattcttattgacatttcctgagttttccagccctaatctaggtctccagcagtcagcgaactagatgttatttctaaaatcaaggtaatggaagctgggaaaatataatcactgtttcataagtacatttcattaaaaatcaatatcttcatacttcgtaggccacaagagaagggaagaaaaatgtgaaaaataattcaaacatctcatctaaacatacttagagaatgccttactctgactttgtgaaccagtccttccatgtttcccttcgtggcatactactgtatttaaagtggggaaacagtacctaacatatgaatttttcagactcagactgcacagattaattgtatctcatcctagaaagcagccatatttagttcattttgctgtgattgattggctgggtgtgggtgagaggcagacccattttcctcaatgttaatttcagttgtgttgagtgtggccatttttgtcaatgatcatggcgtgagtttctgtgattagtcatttaactgtatggtaattgcaagctaaatagagtgtttacaacaaaccccttggtttagagacagagaccatgtcaaattgcatcctatgaaaattgcataaataaaaatttgcatctagaagggcccttcatgaaaatcatgaaaagattgtagaatttttatttgcattgtatagtagctctgtaattgacaaatgaattctaactgtagtccataatacattgcatccaatgattattcatcgtaactgcatatatattgctttgctcattatgaaaagtaacaatgttggcaatcaccttaattgtttttcttatcagattagtgataaagtgccataatgaacataaccttcgagaacgtattcactaatgtaataaacaaagctaggtcttggcacagtacagatcatacaaagatagatttgccttttcatctcttcctgagagccacagcagtacctctctgtgaagtgtccttgactctaacttggtctagaatttcagaagcattcattactttttgtctcatgattagtcaaaaaaagatctggctgggcgcagtggctcacacctataatcccagcactttgggaagccgaggcgggcggatcacaaggtcaggagatcgagaccatcctggctaacacggtaaaaccctgtctctactaaaaatacagaaaaatcagccagctgtggtggctggcgcctgtagtcccagctgttcaggaggctgaggcaggagaatggcatggagccgggaggcagagcttgcagtggagctgagatcgcaccactgcactccggcctgggcgacagagcgaaactccgtctcaaaaaaaaaaaaaaaaaaaaaaaaaaaaaattctataccgtcaatccaaacagagaattacatgaaaatttctaaaaatgaagactttaaagtccctgggtttggacgattgcctgaaaagacttaaataatcagaaaaaaaaaagcttcaaacaccaagacattctcccttctttaaaaatttgagggaaaagattccagggtgaagtggtatgttagtctgttttttcattgctataaagaaatacctgagactaggtaatttataaagaaaagagatttaattggctcattattccacagggtgtacaggaagcatcatgctgacatctgttccacttcagaggaggtctcaggaaacttataatcatggcggaagggggagtaggtgcatcacgtggctggagtggaagcaagaaagagggcggtgcagtgctacacacttaaacaaccagatcgcatgagaactctatcacaagaacaccaccaaggggatggtgctaaaccattcatgaaggatccaccctcatgagctagtcagctcccgccagacccccatctccaacattggggattacaattccacatgaaatttgggtggggacacagatccaaaccgtatcaaatgtcatcacagttgacaatgcctgaggcaattttaattcatcagtgcatagacaacataattcacatctcctgtgcagcaagagggacagatgctatcaaggcttaaacactatgaaagataatatttgtttctctacagaactgaaatcactattatagaactcattattcccattttccctaggtacaaacaaacttcctcctttaagaagagaaagttcatttcttttgccctggtcccaggtttggttggttttcttttccacctcctgttcctctgtttccctttctttttgctctttaaaggccagtacttattctgaaaatgatttcctatttctgaagttagcatacccatcaccttactaacaactaagacacctccatgtgtgtttctcagggacacctgcagataaattgtaagtaggtagttcatgacaatcattatatcattgagagaatttgcaggagacgttcaattatttatgctttaaaacagccattattgggtacccatcacatactgacactcaccgttccaggacctatactttgggatatgaacttctcagaacagagtaggcattgaatgtttattaagtaagtggcagtacctgcttccaataagctcccagtctaatgagggaggtggacctttacacagaaaagtataatttatagtttgatgagtattctagaataattagaaatagccaaaatgggagcacagggaaggaagtaacccagtttaggaagattgagaaaggctccatagaaatagtgtttggggtagattttgaaggaggagcagatgtttgtcaggtgaaaaggttggaagaatggtgtctgagggcatgtgtgtatctgtgtgtagaggagtgtgaacacaggcattccaagcaagggtaatggcacatgttaaggcatggaggctgaagtggtgtagtgaatcctggaaacagtgttcacttttgctggaatctgggagatatccaggtgaggggctaattgagaagaaagataggtgccagaggttgaaagtctctgtgaccttcattgcagagttttggggtttgccaataggaatcaaatgttggtctagtaaaaaagagacaaaaatcacatttattttaaaaatcaacttttcaccattgaggttaatgtcagctgtagggttgttatatatggcctttattgtattgaggtacattccttccatacctagtttgttgagaatttttattatgaaaacaagttgaatttttcatcaaatgctttttctgcatctaatgagattagcatatggtttttgtccttcattttgctaatatgatatttcacatctatagattcacatatgttgaaccatcgttgcatccctgggataaattctacttgatcatggtgaatcacacttttaatatgctgttgaattcagtttactagtactcttgttgttgttgaggatttttgcattgatgttcatcagggatattggtctgtaataattttcttttattgtaatgtctttgtctggctttggtatcagagtaatgctggcctcatgaaaagagttccaaagtactccttcttctttattttttagggagcacttgagaaaaattggtattagttcttctttaaatgacccatgaagtcatcaagtcctgggcttttctttgatgggagaaaattttattgttgattcagtctccttacttattattcatctttttagattttaattttttttcttgattcagtgttgctaagttatatgtgtctatggtttgcccatttcttctagttatccaatttattggcatgttattcttaggatcaggaacaacatgaagatgcccactttaaccacttctattcaatgtaatataatattagaggtccttgccagagtaattaagcaagagaaagaaataaaaggcatctaagtaagaaagtagtgaaattgttgctgtttgctgacaacatgatcctatgtatagaaaaccctaaacaccctatcaaaaaaaccattagaactgaaaaacaaatacagtaaagttgcaggatacaaaatcaacaaacaaaaagcagtagtatttctatacactaacaacaaattatccaaaaaagaaatttaaaaattttattcacaatagctacaaaaactaaaatacctaggaatacatttaaccaaagaggtgaaagatctctacaatgaaaacgtagaacatcgataaaagaaactgaagacacaaatacatggaaatatattctgtcttcatgccttggaaaaattaatattgccaaaatgtgcatactactcaaagcaatatatagatttgaagaaattcctataaaaatttcaatgccatttattcacagaaatagaataaaatcttaaaatttatatagtattgcaaaagacaccaaatagccaaagcaatcttgagcaggaaaaacaaagctggaggcatcacactatttgactttaaactatattacaaagctatagtacatagaacaacatcatattggcataaaaatagatacatcaaccaatagaacagaattgggaacccagaaatgaactcacacatcaatggtctattaatttttaacaaaagtgccaagaacacaatcagtaaaggacagtggctttaacaaagagtgttgggaaaactggatatccatatgcagaagaatgaaactagacccatatctctctccacatacaaaaataaaatcaaaatgggttaagggctcaaatgtaagttctggaactgtaaaactaactagaagaaaacataggagaaaaaaactacgcaacattggtttgagcaattatttttttaatttgacccaaaaaactcaagaaacaaaaccaaaaataaacaaaaggcattacatcagactaaaaatcttctccatagcaagcaaacaacagagtgaagagaaaacctacagattgagagaaaatatttgcaagcaatacctctgataaggggttaatatccaaaatatgtaataactcaaaaactcaatagcagaaaaataaataactcaattttaaaaagggcaacagatatatgaaaaaatgctcaacatctgtaatcattagggaaatgatgagatattacttcccacctgtcagaatgcctattactaaaaaaatgattgaagataacaaatattggcgaggatgggggaaaagaaaatctttgtacattgctggtgggaatgtaaatgagtacagccattattgaaaactgtggacattcctcaaaaaactaaaaacagaacgacagtatggtccggcaattccactactgggtaggtagtctaggacttaaaattagtattatgaagagatagctaaactcttatcttcattacagcattatttacagtgtccaagatgtggaaataacttaagtatcaacccagggatgaatggataaagaaaatgtgatatatatacacaatggaatactatacagccttaataatgaagaaaatctgttttgtgaggcaacatgagtgaacctagaggacattatgttaagtgaaatagaccaggcacataagaagaacaattacatgttctcacttatatatggagtctaaaataataaaactcatagaagcagagagtagattagtgattaccagaggctgggggtggggagtatggggaatgagggagatgttggtcaaagggcagaaagttgcagttagacagcaggaacaaatgataactatttaagttgatggatatgaaattagcttgtttcagtcattccacatcattcatacatatatatatattatatatatataacatataaaataacatcactgtgtacccccataattgtatgtaattataatgtgtcaaaaataaaattaaatttaaaaaactaaatttaaaaaagatcactgtgttcagtgtttcctagggtaaataacttttttaaatgatggatgaaataaaggtaatgtttttctttatttcagaagaactctgaatttataatattgtgcactaagaatctctaaaaggagattatactgtaaagcatccaggaccaccacctctttgttccaaaaccaggaaatctcaaggggtgataatattgtgttcatttccatttatgcaaactgtatgtctattggaaaaggccattccacactcaaggacttcatgtcacatttgggcacttcagtgccctcataatattaatataattggaggttgaaagatttgtgctgtcccaagcaaagcatgaaatgtttcatgaattggtggaaaattaggaccagaaggatgtcatgtgtccatttcagtgttttggttttagggaaatccaagacagtacatgattgattatgattaattgtatttacttacatagttctctttgtggatattttcatctgaactgggaaagcacaagaattaagcagacacctttgaattattcaagctgatggttaaaatagcccattaatatttcagaccactcccctgtacaaaatgattcctacattagttcatctctctgcataaaagcgtcttcacctgaaaaaattaaaaagcttgggctacattttttaaaagtctttccagctgtaagtggtaagggttctgttacttaaacagtatatgagggccacattaattagagtgtatgtcacctaagctttcgccctttttcaggaatttacagatcaccaaggcaaataatgcttaaggcagatcagatatctgtgtggaaaccataaagaaaaacaatagcaaataataacaggttttacttatatattatatactagttttctcaaatttaaatatttattatgtactctgagatgagatagcgacttaaaacacctttccactcaaggcttggcacttagcacagcctgacgtcacttttcatatcatcctaagtctgtgtttcccaaaatgtggtcatgagaccacctacctaatcatactcgctggaaaagcttatcgatgagcattcctgggtgctaatctgctagggatgcagatttcatagagcaggctagagctcaggaatctgcattgttaataaactccccaacagaatcttatgcacatacatttaaatactacttcctccaagatgtaaatcactgtgctgggagtatggccaaataaatagaagagggtctgaggtaacatcagagtaacaggggattaataccactgcatcctggtaactcccctcacttcattctagccaacggcaaggaggttgttgctcctctgtttcaccccttgtcttgtctgaaaggtaaacaaactttccagaaagtagttttaccaacaagtgagggaagggagcaacagaggttggagatctaatggggaaaggtctgccttacgctttttttttttctcaaaaagtagatggagtttggagaaactaaggtgattccagggttcactgtataaactatccagatggatttagagatgataatatgagtacatttggaactaaggcaaagaaccagtgcacatatgataactcaatacaactgaaaacacagccatttgatttttaatgaatacaagaattttaatatgcttccagaccttgtttttcttttttctattttcttgtatttttgaaattctctgtattcttgaatgtggacttttttcttttataaacccagtccactaatgcatacaaagctctgtttctgccctaaggctaagaacattccaggtgaactaatcaatcaattttgcccattaagaaagagcactaaaataaaaagaatcctaaccttttgatggatctgctagttgtttgctaaatactttctttttttaatggcaaaacaccaagaggagaagcagtctttcaccttaaggagaggaaaagcttccagttcctagggaatttgtagcatttggggaatttgtaccatttggggaatttttttttcaaatcctggagtatcggtcaaccatagcatcacttggtgatagtggtgttatttttagttaagtctttctagcccaagttgaaacatgtgcatatttaaaatgtagaataaatgcttttgcaaaacaaactgagaaccaggcgtggtgtttggcttaactgaatacctaactcagcaatagcttttgcacagtgttgttcaaaatatcttccttcaattttcagattctttgccttatattatagaattgatggagtaactgatttattttgtaggatctgaaacttccaactcattatttccaggttctgagtgttatacgactgaacctattggtaatgtgtgttcttccagcctaattgttaaatgagagaagttcatgaagaaaaatgagatatgatgttgcatttcatgaaacagctgcctcagcccaaacaaatgtttctcttatctgtagaagaagataaaataagacatagctgaccagagatcttcaagttttaaaagtttaacaacaacaacaacaacaacaaaacagatgtttcacatgcacagtgtctagcctatcatggtgttttactctggtctactggtggatgcttttcctcagctgaacatattcctaactaataatggaattcaatagagaaattgcattcaggttagaatccaacttagcttaagccattattactttaagcaagagatacataaaattagagaatgacaatctgatttactaaattaataagcacaccacaactatgtttaactcagtattgtggttttaaaggtcagaagtaatggaaaatcaatccatttctcttttcttttcttttttcaggtttttgaccagacaagccaacctttttcaaggtaaacaacatactgttctccaatttgttggcaaaatccagcgaattgttactggttttagataagtttttgctgtatgtcatgagtgagacgttcaaatggtgctcagaattagagtttactggtgatgttagtgattcgagcatgctatgaatattgcttgactaagtactggtcttaagagaaatagagagagagaatgagagagagagagagagagaaagagagagagagacagtgtgtgtgtatctttttcttgcccagtcagcccttttgtgatacagcagactctttgtctctgatgttcaaaaacagaagaagatttctttgtgagcagctgtgacagggccttgcacctctccaaagcctattttggaagaattagaaagcaaagtgcccccagcacagccctaacctttcagctttggtaaggtcttcctgtccaactctagcaggagagtattagccaagttgtgtaactttccaggagtatctgtaaaaattagcaattgaggatgtgttaatcacattaaataacataatagggatccttttttatttcattagaaaatcagaatgcatttgatgtgcaccatctggtttgtgaatacaggaataagttttcaaaagggcacatttccaagttctatgtttcatatgcttcagaaggaaaaacctgtaagcagctctatttttaatgagagcaatggtaaagctaataagattggggtggatttctagtatgtgccatttctcctaaactacatgtgtttgcaatacgtttggcagaaatgtcctgttgagaggctgggcttccaattgaaaattttaaagttctccatgtgttaattggaaaatagagaaagctatcattgtagtagagcatctggctttctaggtattaactatgggtccatctactcataaagactagtattttaaagttatctcctgttacttactatgttaattctagagactgtaagtttcagatcatagaaaaagtcaagttaaacttcattatgtattgtatgctttttaaaaatgtcttttagatgcagtcgctgtttgtacataataagcagaaacaaaataataataaaataccagatttactattgctacccccatattgagttcttaaaatatattttttacttaaacaaaaatatagctctggaatgtagtcatcttactctatgaaacagaaacatatttggatcacaaacctgctttagaggagtaattccttcagtttcttccataattcttacaattctatacagtaacaaacaggatttgtgaggcaatataatgttcttcttaacctctcagtaattggaggcatcttctgtatgtattccacaagtccagctcatgctgatgaaggaagtataattacattacaggcaatctcatctaaggtaattacaattgtcaccgtcaatccaattaaacaggataactaactctactgagtcagaagcaccataaagctttctgactaaatccaggctttgggataaggatgtgattagaattctgagaattttcatttgctaaaatactgttgtgtatacaaatagataacaatgctgggaggggggcttgtggggagagattggatacaggtagacttttttttttttcatttactgatcaatttcttatttctaagccagaaatcactgtagattcttggcatcaaacttcaggccacacaacatcattatggaaaggttaccccagcatcacaacatcctaatgctctactgttcccatctggcctcttgtcctgaatcaagcctggatctcattattgcttcagagacctttcatcttgttccagttgtaaagatgcaaaacaccatctcctgagctccatccctgcctttgcaggatggaagaagttggctcaagtaacagtcccccacccccgaaactcttgcaatggtttgtacagggtcactgtgggaggcaacgtagaacatcactaagaattacagaggtgtaatgacaagtggataggatccacttctcaaagatttcacctctgtctctatagtccaggcaagaggataagctttggataacagaactcagagaatgagaaatggaaatgatattgggcactgtgactaagattgataaagggcccaagtgagatggcgtatgctttcattggatggtacattatgtgaagatactggtgttttctttatggtttttcatatataaagagatataggagataaacttcttcatcatggggtaggaggggagaatttgcaatctgatgtcaatggctcccttagtcacccgtgactcaccactcagcatcatctctcagaagcccacaccctggcttttctgtcctgtagctgggaccttctgcctgtctccatttcttcctatgtgtttttcatccctttcacactccttgccactcatggatgcctcttctctttgtccctataggaacttccaatcctgctttagaacttactccttcaggaaagcaactctcactgaagtgtgggagcggagcagagaaaagactaggtaggaagagagccgagctcaattttatattccacaactaactggttctgactttctcaacaagtcgccaaagctagctgagtccaagttcctcatctgtaaaataaagatgttaccatctgtcccgccaaccccattttacttaatttcattgtgcgtgtctaaaatgaagttacaaatgtgcgaaaagtccctcgtaatttataaattccatacaaatttgagggaatatatataattattattcttattaagtcccctccccctcgccccgattatttccttctgttgattcctgcagcccttgcaatttaaatggtacttctaaaaacgccctcttttatttcctggtgtattgtttctgtactttctgtttccttttgagtgtctaagaacccaaaggctggcactatgttgcttatttcttttctgtttttcctaacatttaatttattttctgaccccctgagatggagtgatgtgtcgaggcattgcattgtgtttataccctcttttgttttcctcccatgactgcaagcatacagcccaacttagtcttgaagaagtcaggctgcagcatcagttaacgagcatagaaagggcccaggtaggaaccggaggcagaggccttctgtgatgctcttggcaatgactaagaccatggcctgacccttggagatggagaggagggagtctcatagtgcttgagattgggtttcttgtctttctgaaaggataaagatcaaaaaccaaattaatttgactttaaaaaataaagaagagaaacatttctttcacatccaagtttgtggactaaagctttacataaagaaagtgcttaacacgtaattgttattacagtatgtaatacctaaaaagactctacaatccatccggtccgataaacttaagagaaaaataaagcctagaaagtcttaagctatttcatttcttaggggtagaagtgggtatccttccactacttatttaaagacaactaaacagggatatgctaatagcttcaattaaaattatggaagaagtagtccaggagacgtcttgaaacttgaaactttgtcaaattgaattaactattttaaatactcagaattttcattaacatacaatatatgttacacttacaatatttgttgtgtttgaaattcagagagtaatttgttagattctttctcttttaaaactctaggatccatccttggtggattttatgacaatgcctgtaaaatggagtagctataaggaattattcactgtaatagtttgctggagtgcagtggcatgatcttggctcactgcaagctctgcttcctgggttcatgccattctcctgcctcagtctcccgagtagctgggactgtaggcgcccaccaccaccatgcctggctaatttttttttttttgtatttttagtagaaataaggtttcaccatgttagccaggatggtctccatctcctgacctcgcaatctgcctgcctcagcctcccaaagtgctgggattacaggcgtgagccactgcacccggcctcactgtaatagttatctactgctgtgtaaccaatatccctgaaatttcacagcttaaaacaaacacatgctgtctcacatagtttctgagagtcaggaatctgagagtggttttgtgcaaggtctctcaggaggcaaatctaagatgttggtacctcagccatctgaatgctgggctgggagtggagggtccacttccccaagggctcattaacatggctgttagcagagccctctgcttctcattatctattactaggaggctcaattccttacatgttcgcctctccataggccacttgagtgtcctcaagacatggcatcagatttcttccacaatgagtgatctgagacagagagaaaggatcagataggaaaagagaacaagcaataaatctaagaggcttttactcacaccaaccaactcggacaccaactgggtgtccaacaattctattcaattctgataccaattcccagagttagtgcagacacccctgggtcaagggcttaatcccacaagactgcccctacttcagatgccaactgcagatggggtgtcttaggctacctttcagagaacagcacctccccaactcggacatttccccaaccacatccccgatccccaccaggcagcccaggatcaataatttgctagaattactcacagaactcaggaaagcactttacttgctattacaggtttattataaaggatacaattcaggaacagccaaatggaagagattcatagaaggtatgggggttggaggcttccatgcactctccatgtgcaccactcacccagctcctccatgtgttcaccaacccagaagctcttctaaacctccattgtttaggggcttttttggaggttttattaagtaagcacaattaattacatcactgaccattcaagattaactcaatctctaaccccttttccctggacctggaggttgagggttggggctgaaagctccaagcttctaatgaaggcttggtctttctgatgacctgcctccatcctgaagctatctagaggcttgctaagagttgcctcattagaacacatatgctcctatcaccctactactttttttatatatatagagacagaggggtggtgcagggtagatttaatttacatagtagcaactcaggggccagttagagctggcagagttggggaatctataaccctaaatggcatccctcctccccttcccccttggagaccagtccttacatttggatggggctctctgggttgtaaagaggatagtccattttaaaagagagagagatctgagaataaggctgtctccaagtcaggggaagtccaggcctggagatagttctctgtgtggtgttccaggggtttgagggaacaggggttcctcaacaggagttctgtgccaggcactatggacaaagatagaatgtctttcttattataccacaaagccacagtaccttttatgacctagcttcagaagtgacatgccatcacttctgctgtattctcttggtcacaaagaccaattatgatacattgtaggaggaaactgcacaaggacttgaataccaagaggcaggaatcattggagcccatgttggaggctggctacacatccaccatgatttttcttcctttatccacagatgtttcaaggaaatctggtgtccttttgaatgtggtttgaatatgctcataatgtgattccttggctaaatgatgacatgttatctatttacattactaaactcttggtggcccttgcacatgtgagctgttgaaacaaaagcttgcttgaaattctcacaggaattctcaaggcctgaaaatgggctatgtgtcccattcagacttctgaaggcaacctctggcaatggagagatgcctggcccaaaccacaggacctgggctgcactaatactcttgctgctgaattgtgccatgacctccaatttcccatccttaagatccaagaatcaagggagatgatctacattgaaccttcttgtgccaaattagaaactagcctaagaaggcttaaataaaattgtttgaaaattatgataaggacttgatcagatagataccttttggtgaaggtgagatcaaggatctaggaatatgtttagtagatttgtagaacttacatttctttttaaaaagaagtttattaaaatcatatatgacttccccagtcagtcaccacatactctaattgacccataaaatgttatctctggcatgacactttataattgaccaatatggttagatcacagatcatataactaacaagcagccttagaaatttcctactttctcaatttatagacagacaaatggaggttcatcaagattaatgactgtctccaggtgacaaagcaagctagtggcagcagcagcatgtaactcagaacatctggatccttgtccctttccacctacctactataccaagtagttggtgtgtatttcctctatcactctaagtaaatatctacttaccttttatttaaaacaagcaagcagacagtttgagaaggagagcattattggcttgaagggaaaagtgccaatgtgtctaagaaaatattttcatttaacagtgcaggcctaattaagattcagccctctgttttataaatcttgcaaatgcgtaaccttgttcttatgagaagctgttttggagaaccatgaaatatgggcttgtagcccatttacattgtactctgtgacatgtgaggtattgatgaagcattggaaggggtacactggcctttctttaaagagagagaagctggtggaagataagtgataattctgcagacaggcaaaaggcctagggagaggatgccaggagtatgctgggcttctgccaaacatttctttggccactttgttttcctgtcatttctctttgtcttatcttatccctttcaaagctttttgcactgtctgttataactgtggtcataatttgacctaagagagtgctgtatattctccaccctcaagattattatttaaaagttttccagcttacatgtaaacaaagactgttctttttgcagtcaagataatattattatggaatggttcatttgtgtgccgagtgggagtagacttgaattttctgccgtttccttaaaggaacatgatggtaatttacttacttagatgatttaaaagacataaaaatatttaatccatagattactgattcataaacttctttacctcctcctctgtcactggcaattatattttctagattaacctaaatgaactattaatgaccaaaaactggactaattacatctactggggatggttttacttttagaggaattttcatctgtagacttcaacagtagaaaatgagcttcctccttacctgttttggtgaggagaaaacagttgtacaatacctgatttgctagattttcattaaaattgcaaagttaccaactgttatctggtggaggaaagctactttttttgcttttcctcattattcccttcataatttctcttcccagttaaagagcagtgtttcaagaactcataagcatcaaatcacctcctatatttgggtatgaacatatatatgccattacctattaatgtatattatgtgtaaatcatatatgtatatataatccttatataatattttctctggatccaaattcaacaataattcaatctccttctgcccaaaatctgaagtatatgtatttaaatcatactttcagcaccttgtttctggtacaattaaatggaacatttgtaatgttgaatccttttacctttgaatgtcattgtaatctccagtaatttcctacaggaccaagctataaattatacaaaaataagcattaatacattttactccttgaattattacggaacactctgcttttttctagcctatgttcatatatttgattctggttcacacatttatagaaaacattataggtgagaattcaatgtgttcttcctatattcattgaacttacataaacactcaatacaatagcttaaagttgtatcatgaattttcactgactgtcagacttgggacatttaagtgaccatattagttgtgccataacacggattgtgtaacaaatagaagaatggagtaaccatagggtttctgtctgtaacttttgcgtctatgttacctttacagcccattacatagatcttaataaataaaacacttgtaaatgaaataagaagatatagagggaaggatatgaatgtataccatgctgcagtggaaaaaccatgttgagatatatatttggggcagaattcactagtttattgtgaccagcatgttcctacatgtttggagcttgatgtaatgtacaaatatgagtctacaagtttaaaaacagaaaacagaagacttttcagtggccagttttttctgcctatttaggtacgtattcgcttaagctgcccctaaattgaggagcaactcccttaaacatttgaaggtacatatacgcaggtcttaattgaccccaaaggaggcctttgaacttcactgcttctaaaacatatttaaaatttaagtctttctgcactaaaatagcatatatatgtgatgtgtaagtcaaaaggcttactaaatctttatccccgtaacccaattaacctggatttatgccctacttgctcatgcaggaagtccataactgtaaatgtgcccctctccaagtcctcccaggcactcccaggtgataccgcatgtgtactcagaagcaattttctcagcacctgcatttactttacttgaggctccaccaggaaggacaccctctcccactgcctgccactgcccctgtggcttcagcagccctgctgccttttgcagcatccattaggtgctgcatgtgtgctctgttctgcctaatgaccctgtctttcttcctgctcgatccagcctggtcattatctcctggtggctgctttgaggatatccagactgtccagcagcctgcaatagagtgaggagaattgatttcttctgtggttaaagaggggtcttactaaggaagtatttcttgactctcagtgagttagacagtttaacacaaaggttctatttttgcttctagccctttcttcctccaggacctagccacgtttcaggatacaggccgtaggctgacttcctactcttcaccaatgcctaggaaacgtatataagcaagattatccccactggctctctcttccattagggtgagttcttcccagaaagataattagtgccacagcctaacccttctagacttctactggaccaccacataagttcgacacacatgcccagctttatttgaattccaacagtggattcacctttaaccacatctcctcatcctcaagaaaaactctgggctctatttgaatacatgtttttttatgcccttaatacctgtgtgatgaaaagttgcagacatgtctaaaccttaatgatgaagagtaacaggctgaagctcaggcaaacgcccccgccaccatgtgtacatttatcatttttcactcttttgaagaaatcactttcatcatctgcttccttcctagatatatctcactcattcggagtataataatttagtcttggtaccatttttcttttccaaattcttaatataagtagcaatactctatgctaaaatattgaaaaaagaaattttcccagcacttacgtgtttttccacagctgaaaatatagttaataagctgcagaaatgcccaacatgattgtttccaaagtagagagcagaatgaaagaaagcaggacaggaaaggaaacagatactactgtagctcattttgaagtggattaagttatttaaggaatgactatatgttatatggcagttaaaaagattttaaaacagctagatatgctcagagcatatgtctttacatggcaaatggcacacaaatgactgaggctttatcgtcattcctaatgtaggcagcacctagtggtgagaacatatgaaatcccagcctaaggaggcaacagcaaaggcacctgagtcaaggttgcacataattgattagcctacccactgccaccgtcctacatacacacacacacacacacacacacacacacacacacacgcatgcacacaagcacacacaaacatgtaggagtctaggacttagttacagaatctgtgctacagataccagtctttacatttgtctacatttcagctgcaagataccttgccttttttataccctacatgtctaacaataaatgatttagttatgacaacatgctatcatatgtattaaaagattttgcaatacattttttaaaaatgggaaaatagtcacaatttttaagatttgggaaaatactcaagccaaaacattaagtgaaaaaccagattatagcactttgtatacaatataacgaacgtgtgtgtgtgtttatatgtacaaagtacacaaaatatacttatcattaggctgacgtaattacagggaatgtttttgatagatttttctatagggtccatattttctgtaatgaacatacattaatttgataaagaaaaaatgtggccttgtatagaaacgtaaatcttagaacaatgtttacagatagttaagacgtaaaggattagtgcaaatgtcacagtcctggagcactagaaaaagcattaaatagtttgcaaggaaggaaagcttatcccataagagccactaaagtgaaagttgataaatcaatgtcaaaagttatgtttttggagagactgtggttttgattaagctgaaacaaagtggccacattgaagtggagccagtgcccgatggaaaatacatgtaagaactgcttaacagtggcattgagaaaaaggtgcagaaataaagatgccaggtgaaaatagagtgtgagggaatgaaggggaaatgaatgagaacagaaaggagagatgtgagtttctgctccttggctttatcctgagtttagaaaatcatgtctataaagtggaattagttggttaggagttgaagctgattggtaggcattggaatggttgttctggagagaatgatatactctccagagtataaatttcatagcaaaagcaatgctctttatgctgcccctgaggccataccattgtccctttgcatgtttggatttgtaattggccccttaaaagaattgagcctgcagtttggtgaccaacctaagggctcatggtgactaagacagaactttctactgagaaaataagcaattttgagaacaaaatacaaatacaatgcaatcatcagtcccttgcctacctaaacagaagaaattcaatgtatttcttcctttggggcaaagttaacacagtacattattacattagagagtaatgccgttaaaaatcggtgaggtgtaagaagctcttatccaaaatgatgccatgagggctaaggttgtagatacctcatgctccttttcatagttattacttcttttctctaatttcctggatttctactgtggtttctcactgtctctagtggtccccaaacccttctcatttgttccttgcattgtatctgggcttagaaaatgtgtcagagagaaagggctcaatgaactttcttgtgaatgaagggtatgggctttagcactcagacttttatgaagatggttttggcaactcaaaggccttgtttattttttattttttattttttttttggtgtctggaatgttgagattgacaaataggtgagttattataaatgaaatgatatcaaacaattgttctcttggcaacttgctataaatctgcaacttttacaacttcttttctagatcttgtagttaacaaatgccttaacaatgctaatgtagaatttaaagcatagaacacatttcagaatgttgtaaatgtttttatgaaaaacataatgttggtgaattttaaactctgtggagcctaccattagactttatttttccattatttttgagataaagaatacatctgattattctaaaatctaaggaacttcaaatatgtacctctacataatttggagctaaataactgtttgcaatcacagcattgagaaagcctctacccccacacatacaccgtcacacaataatcatatttcacctcaactcactctatcctacaccttcaattggtggaagggtaggtttgagcctcatttattcattcattaggttacattttaagtttccactgcattttcagcactgttttaatgaatatttcgtgcattcctcatcaaatatttattgagcccctgtatgcatcaatttccttccaggttttgaggatacagtagtgaatgtgacagacaaagcctcctcagtcagaaagcttaaaattctctcggaggaagatagcaaacaaatgcactcataatacaaaaattaccaggtagtgctcagttttagggtgagatactaagatgagtaacatttaacatttttcctttgtcgtcatggtgcttacaggacaaattgtaagtaaagaaaatatttagaagtacagtatatctggaccattcagagacccccaaaactttattttttaatttttttttttgagacggagtctcactctgtcacccaggctggagtgctggagtgtggtggcgcgatctcagctcactgcaagttccgcctcccaggttcacgccattctcctgcctcagcctctccaagtagctgggattacaggcgcccgccaccacgcccagctaatttttttatacatatttttagtagagatggggtttcaccgtggtctcaatctcctgacctcgtgatccgcccgcctcggcctcccaaaatgctgggattacaagcgtgagccaccgcgcccagccactttatttttaaatgaatcttattctttcaaggaatatttaaatttagtaccatttgtacaacttaatgccattaatactaagtgacagttaagcctttttatatccagttctaattcattacaaaatgtcagctaccctgtaagtagagaggccccaaagatcccattacagaaatctaaataaaataaaacaaagcaaaaaacaaatgatgaatgaatcaggtgaaaaaaagaaacacacacacaaacaacctgcctcaaaacatagttacaaagtgcgtgcccaaaccacttccctggcatctctctggatgatcaagattcgcagtgtccattgcaaacacctcatgcagcacacttaggagttttgtcagctccctccagtcatggcaggcaatacataaccattcagatggttcaaatgggtcaacattgctgctgtttgttgtatcaagtgccaaactccttctttaagttgacaaccctcatttaattctttgcagttcaaatccctctttctctccagcttcttgttcccctctgaaagagctgagcttcctgtctaaagtcatttggatcccagctggagacatgagaccttatgcagtcagccagtcagtccctcctcccagctccagtgtcttttacacatctatcttcatagtccttctgatctcactaagtactttggtgcacgtatcaactccccagtataatttgtgttccctaagagttcccaccctccagtctctgtagatccaggacctagcatggtttaggatctacaatcattgaaatacaaggcttaggagtcagacccttctgggcttgaatttagactctgccacttagcatgtgtgacagtgacaatttacttattccttggagcctcagtgccctcatctggaaaatggggttaataacaatatccatcctacaggtttaatctggtgattaaatgagataacatttctcttaatgtctggccaattttcgtcaattatttttattattgtttcctccatacattcaacagatacatttctcaaggccctagtatgtgccaaccacaacctgttagggaataagcctgaaatgattggaactcagggtgaatcccaggggcattctaaaaatgttttcttcaacctaataaagttgaccttccatatacacaaattatgtatgattcgaccaaccacaggtcaaaaatatttggaaaatagcaataaaaaataatacaataataaaaaatgcaaataaaaacaatgcagtatcactatttacatagcatttacattgtattaggcattagaagtaatcgacagtgatttaaagtatatggcaggatgtatataagttgtatgcaaatactctgccatattatataagcaacttgcgcatctgtggattttggtatccacaggggtcctttaaccaatggcacagataccaaggatgactatacatgacaacttccatgactctagttttctcacagttattttctcttttttaactgtaaaaattaaggcttcatttatacacacaaaaacaagtatttttttacgaaactgtcttcttgtgtttattttgcaaagatgaggaagttttagggttttgtttttcacctattgcaaaaaaaatccttatcaaagaaaacaaataaggaatacccaagggtcacgaattctaatgtatttgaatagttggcttcgggaccttttattaccacatcagtccaaatgagtataataaaaggagagaaaagtgtgccacacataagaaggaaattctattttatttgacactcatgcaagccctgtacagaaattgtctctttgcgaaagcatttgcattaataaagcaaaaatatgaaaaccatttcagatggattgttaaaaatctgaaagggacatgagctttgcattttaaatcaaaagtatacagtgccatgaattatccagttactgaagagcacatttttcctctaaatgtctgggaaactcctaacacatgttgaggcccaattcaaatacttaaataatacctcctccctaaagtcttcctgtaaattagctgcatccactttgggtcacctttaatcctttgtgcatattcaagtatgattacgtcttatttgaattaatatttaccgatctctcaccctctttcatttgttatatactcaagtgtctagaccttgacttaaaatcttttttttttttctttttttgagatagagtctctcttgctctgttgccaggctggagtgcagtggtgcaatctcagctaactgcagcctccacctcacaggttcaagtgattctcctgcctcagcctcccaagtagctgggactacaggtgcgtgccaccacgcctggctaatttttttgtatttttagtagagacagggtttcaccatgttagccaggatggtctcgatctcctgaccttgtggtccacttgcctcagcctcccaaagtgctggaattacatgtgtgagccatcatacccagcctaaaaatctctattttcagtgctctacttggctatgacacaatggtaggtgtttaaaaagagagagcgagtataagaattattgactgtatgtgattgctctccaaagaggaaaaaaaaaaaaaaagatgatcctagacaaggtattgtttaagtgtgtaggtatttatgtgggtaaatgatgcatctgtgaaaggtttggctacgacagaatttgtgtgtactttctgcctactgggactctgagttgtctatgatggaaaagtagatgttggaaataaaagactgtacacccagtgttgtataggctgtacacatttctttattaacaccttactctctttctcctttatggaattcaaaccccagccctcttaccttctcccaacagctctatgacttctagacagcattgcacatatgttgagaagtattttcgatctccttagcagcttcaactgaactgctaagaaacagctggtttgggcatacatgcttttttacacctgaatttctagtcacgtgttagcccagggccaagacttgcagcagcaaacttagctcccaggcatgatcgttagcaggagtgagctgttgccttctatgagcccaacagtgagttgcttgccaaagtcatcactccaccttgatctcctggttagtcaagttcagtcaagatttccctcagaagctggagctcgttactgtttctccagtctcttccaaggttacctaccttctctggcagaggataaggaattcatcatctttcagactgcagtctgttgcttggaggcttggaggaaactggctgagaaaatcatagttagtagttgataacaggccaatgaaaattagcgagactaaggggactacgaaaagtagttgctaatgggacaaagttttactatgtcttccatgatgaaattcaacctcttcatggcctctttaggaaggggtcagtaaaaacttctactatttttaaaagttgccacaaacaaagtttgatttgctttgaatgtgacaccataacagaagtaggctttcaggaaagaggaaaatggccagttttgtatttttggtttggttctgtttctttgtatttttttcccactttagaacatacaggaatgttgtagaacattctctctttctttgagaaacatttagcacggtttctaaatataccctgcagagttaaattcctgtgtttggtttagactgagatctgttgacctaaggcaagacttcgacagattcagttttttcacctgtaaaatgggatggtacctacctcttagggctgagctagagattaattgagttaatctatataaacacttagaacattgcctggcacaaagcaagagctagatgctgtgtaactattagttactcttaacatctccctctcatttgagttcatttcctccaactgatatttcactgggcatccatttggtatggtcctgataagatgtctcgtctaattccttgtctcttctcccttaattgagttgattctcaaggttaatgcatttttattgatttattcttgggaacacagaagacagttcagagaatattcaaactaggagaaacaattttggccccagtgtagcctgctgggtgacctaacccttgctgggctttaatcctctgtctgtaagatggggataatacttaattggcactctttcagtgcttagatggctaacaacaacaataaaaagctgagtaatttgtaaatataaagagttaataggtacttcataactgaaatcagactgtcctaaaagagcagctcatttatttgaaaaaccatacaatccgaggaggtttttgcctgacctaggcaagccaccctctgaccgaggctctaaaaggactgccctggaaagcaaaggaggctggaccagcaaagcaataggctggtgccatggcaacactttcagaagagacttgcctgtggctctgcctacacaagcctctgaaaagtaaagcattcaatcaatgagttgcattgtccactggacacttcagccgatcaatgtggctgatctcgtcactgaattaattgggtcacttttgtgtgatgtagctttagggatttttgtgtgtttttcccattatagaaatagtagagttaatctccagtctgtatttagcttcacgtttgacctttgccacctctctgtgttggaaagggcaaaaagaggaacataatggaataagaataatctcagaaataagtgtatggtgcagccagagttgaatgactgctacaatacagaataacttcataggtaacattgaacatgttaactgagtgtaaatatcagattcttcatctatacagtagggctataatagtaacttcttagggaggttttgaagattcagagagatgatatgtgtgattaggctttgtgaaatatgtagtagtcagatattataaaaggagctgctctttatccatctgggtcactttccagagggaggtaaagctggcatttctggagttgaacctatgggccagaagggctgtgaactggtgcacttttgggtaaaggataattgaggaggaactcagccgacgttgcaggattcaagcacaggcagttgtgcaggccaggtagtttccaaggcagtagcaccctggcagaaagagccaaaccactaagggaagacctgtgctagtcatcatttaggctagacaaaaacgacttgcttgccttcttgtttcctttcctctcctttggagggaattaggctcctcacttgtgtgtgtgttggttgagtggtggaggagagcattatattcatcttcaaacctttagttaaagcaacgcaagagggtggggttctccacacccatagctgacatctgctttgacaagcagtggaatggatggtggcattagatgacaagtcgcacttggccagtgggcctgcaggccagagcccaggtatgaggacgtgttccttggtcctagataaaataagtggaataagtacaaagtagtgagctttagccaagctaaatttcttttctttttagcagtgttccttaaagtgtggcctacagaccagcagcatcagtatcactaaggaacttgttagaaagatgaaattcaggcccactagaccatatgaatcagcatcttggggagaggcccagaagtctgtttttaacaagccatcatggtgatttggtttgctcgctaaagtctgagaatcactgacttaatggagtgctctttagtgtgaatttgaggcaccaaaatgaaatgaaattacttttaaaaatgaaatgatgatgaaaatgaatggaatttttgtccatgttataacatccttacttggaaaactataagactagcaaccctatgtcatgtttattgccctcagaaatccaaaggtcaaaagaaaaatttccttcagagaccttccaaagcttagattttattattttaattgatttttgtctccctattcacattacatctgctgttcaatacaggatgtgactgaaaggatgtgtcttagaaaaggggttgcggtgacagtggaaccaggggttacaatatgacaccccagcctgaactcaccacttgagacatggttctagcaggtcatagcacagtgatcctcccatcttttgcccagacagcaagcttctgttaatgtcatctaagactgcactcccttcctaaagggcagtctcacaagatcagcaccttctgcatgcccaccctgtgcacatgcagtgaatgtttttgaattttttaaatggatatgtccatttgcaagcgatctcacacctgggagtgccaagcagggagagtccctgagtggagggcatgtgcccaggctcctcacaccctctggaggcaggggaatgagagtatctgcttcagcatgtcagcacttggttcactttattctcaatatcaagacaatggggacttgtaatttcagggcacaggggaaataataactaatatttaaagtttaaaaattaagatgaacatgcagcctctggtgacttattgatctggtcctgggatattttttaaaaagcaaatcagccagctgtgctgacactccgtatattcatcttccttacttcatcatcctgtcagtgtgtcatgatctagtgggtactaaaggcagtaaattaggaagtggtcgttgtggctgaggggtttcacttgcctttaaaatatatatatatatatacacacatatatatatatattctttgtgcaaatattttattgtgagtgtgggttttttttaacctttggattagtggggttcagaggaatatgtcttagctactcatctctccaatgtggcagagggaagctgaggcaggtaagactccaatctgtccccaggctggggtctagtgacccaggttaaatgccctggtgcattccacctgtgacccagctcttgacagcacggaatcctgcctttgtaaaataggagatccctaatgaagaagaagaacacacagggtgatatgaaaaaaaaaccctgtgttgcatacacaacgggcatatagactcatagagatgggctcttacatccttgttagttcacagtcagtggtgagaaaatagcctagaactaacctaccctgttaaagttctagatggtagcattttctcaaacttcccctaggtgaacacatgtgcatgcatgctcaagcacccactacaacagcaggtgagaaccccaccaactaaaacatgcagtgctcacttgcatcatagatgcttgtctctgactttttgctaagtagaacaaaaggatcgccaaatgtcataaactgcagtcacgatcagaaatagaaacgtaggagttataagcactgtatgtccaaactcttcccccaggacagatttttttttttaattttagttgaattagctaaatacataagcccggtgaatcaacagtgatgactcactttagatcttccttggcaaggaagtctaaacctgtgcaaagagagcagctgtgtctggtagagccagtttggggctatgggcaatttccggggtccccagagtgcctgagttcatagccacactttacgtcactttcacctgcagctcttgcaagctcctgaatccctctgtgccctagagcatgaaaagtggtaaaggtcttcctccacacccacagccccaccctctctgcacaggagatcctgatttggctgtcagctctacatcttcccttttatgtggctctaaggacttcacttaatctttttgcctcagctttctcacctgtcaaacagacataattcaatcaattccaccttcttcacaatgttgttataaagagctaccaaggtagtacatatagaagacatatagaagcactttgtaagcatgaagtgtcttatgaaagctattattggccttcaagcacaacactttaaccccatccctaattttcagaggctatgaaagctagtggttgctgtctcctaaaagtgtgggatagtaacctggagggttccgttcatgaggaggaagtccctggtggcactactgagaggggtgattgaacaggaccaaaaactcacctaggactcatcagggtagattgctggtggttgaggttataaataacttactgaccaaaactttttgaggtagctttaaatcagtgagtcttttgaatctatgcatatgcaggtgaaacccagccaaaaaaaaaaaaaaaaaagaaatgaaaatatgggagggattgctgactcagctaccttcattcacagagagtctcaaaacgtgggaataacagtaaccaaagttcagcttcctcaattgcaaataaagctgaaattctgtctgatttccatgaggtttcctctaatgttacctctctcctcagcatggaaccggagtatgctaaagccaggaaattcagcctatccaaaggaagcatcacagaagccactgtagaatcagccaaatctgcaggagttcagtttgtctttagcgtccttgaccttttaatgcatctcttcaactttgcttctccttgctcctgatatcctcttaggaattctgcagaagccgaccccaaaaccaccatttgggtatgagcaagttactaagaaaatactcctagggcacaccagtaagggagagggggttgcaggacaggaaaggagaagtcaatcaagtgtgtgattttggccaaagtcctagctcaagcatgatccccaaggggagctctggagcataaattacattttagcatttgttccactgaaggcttgggagctcagctttcaaaggcgtgcaggggttggtattgataaggccacctgaggggtttgtaaactctcagaaacttctggcattctgcaagagcagttccagaagtccttggaaagtcccctcaagagagttgcgggcatggccctcagaagttaaaaaaacacaagctggggaaagagtgcatggaatcagtaggaaggatcccagggaatctagagagagctcaaccagtccactacccactgtagtgacaaccctctttctttaaaactgcccttctcttcccccctccctctcctgaagccctgtcttcaagtcaaaatagtgatgtcaagtttctatctgtgtgaaaggcataagtagctttatttgtagagttttgtccatgcttcttatcatggtccatgagcccctcaccatgctggtcctgccttccaaggcccaactattgccctgcccagtctcagcctcatgtgttagctgggtcttctgttatttgtagctaaagtaatgatactgatcaccacacaacagtgaacattcattgagtgcttatttctgtgctagtttatggactttacctaaattaactcatttattcctcccaataacctcttttatataggtaaaattatcatccttattttacaggtaaggcaactgatacaaaataatgtttgttgtcagtagtaaaatttatcttgatttgtaagccaatggaataattagttttagaaaaatactaggatgcatcatcaagcaaataattagcaactgcttggaaaatgagagtggtgttgatactaccagcagtagtttgtgaagagcaggtaagtcagatcagtttcattttctcccataatagaatggtagccatgacagacatgggaaaaggtacggatgttatgtatcttctttcatgtactcaataaaatattttcaagggcttctgtgaggtaatggaaggaaacaagaaacagacctatgtcctgtttcagagtattttgtagcccagaaggaaaaataagacatccatatagatcattgtgatatacctgtgcttcaaatcttgccctctctataatccattcttcacactgaagggaaaatagtttttaattttcccatgaaacgaactgagaatgtcagaatcctgctttaaaaatccttcgatgtgtccccactggaatcaaagtctaggctcctgaccctggctgacaaaactccccgtgagctggccctgccagtctctccaatctcctgtcccaccagttctcctgatccccctctgtcattcagaactgccgtccgtacccaggagaaatatgatctgtcctcaccttcagacctttgcacctattgtctagaacgttcttcatgccctttttgacctggtttacttgtacttgtccttcatatctcactcagcatagacactgcgtgttcttggaagacttccttatcccccaaggctgtgttaggagccgtacttgcatgcttccctagcttcaggtatttgcccatatgctcacacttattctactgccttgcacatttctattagcctaggggaataagataaaaagagttattaatggtgttgacctgagaagctctatcaaacactttctggtaggactgtgtcattttttattacctctgtgaaaaacttacaaatatagtcatccaatttgtacataatgtgaaaatagatggggttaccggaattctagatatggggaaaaatagaaagtgttcttgaaagattagaaaatgatttcatcaacaaagctgaaatgtaatatggcaaatgccaggtcatcctccaaagaacacaaatcttgtaacacaaatataggatggctaagcagaaatatagtggaaaaacacttaggacagataactaaccatgagataaatgtgagtcagcaatgaagtgccattacaggaagaaaatgcaggacaaattcatatttcccagatgcattaaatgaggcttgatatatttggctgggaagggaattttacctccaccatggctttagcagagtaaggcatctactttcagtcaccaagtgataaactaatgaaatatattttgtcaaattagtgaagaaaatgagataatttcacatagactggagaagggaattattgtttctgagactcaaacaatgcggctacatcacacttttaaactgttttccaattaacaacatgctgcattaatgaacatcctctccttcaatttttacaatacgttacaggttaaccatgattatcaccattttagagattttttaataagaaagctgatttttttttatgttcagaaaagaccaaatgaagttaagattctggttgacaaatcacttttctcccaaagattttttggggggagaaaaccttgctcatggagaggaataaaaattctgagccaaaacccagtacccagcttatggcctaattgttatatgctatgataattgttaaggggttgaagtgaatgaatgcataaatacaggagtgataaaatatttagacgagttattactgaatgttgaaaaataagaagaaaataggcaatcatctgccatgtgtggtttagatgggtgggcttcacattttttatgttccatctttatcagtaaaatgcctattgaaaatatgcacaacaggactgggtgcgatggcacatgcctgtaatcccagcactttataaggctgtggcaggcaaattgcttgagctcaggagctgggcaacatggtgaaaccccgtctctacaaaaataaaaattacaaaaaaaaattagccaggcatggtggcgtgtacctgtagtcccagctacttgggaggctgaggtgagaggatcgctataccccagcctgggtgacagagcctgaccgtgtctcaaaaatattaataataataataataataataaattttgaaaaaagaaaatatgcacaacaaataggaatgtttatttatttatgaattatatgcatgattacgtactgttaaactttatgcaacatttacaaaaacttaatttaaaagggtgtgataaaatatagataaatatgacttcactattttcttcctgtattccaatacgatcactttcataatcctaaagtaaccatatcttattttgaaggccattacttaaaacattttctagctgaagatttctcagggcttgaagagaccagggattatgaaaagccaggaagggggcctggggcaggtgaatgagattgagccttagtagacttttaaaatatataacttgtgcccaatttataggctttctaggcaggtagagttggaagacttctttggtcaggaatgactgataagacttaaggtcctaggagggcataagcattgctcacctaagagttgtgagatgtgcatcacaaccgtgtgggctctacatgaaatcaggggtctgtctaaggaaacttccccaaatgtccaaggacagaagagcagacacagagttccctggatgtgcttactaagacactatggtttgtggtttattcttttatgagaatgtgagttccctgagtgtgtggctgcccttccatgggcatgtcactgctacttccactcagaagtgctcttcttaatcaaagtggccagtaacctacatgcttatctgagtgtggactttctgaattcctgttgtcattggcttcccaaagacttggagaaactgaggacattccatgaagccctacgtttgtcatcctataaaaacaaaaagagttttcaatgtctttatttgaccaagaaaacaagaaaagtatattaaagaagggctctgaaaaacagtgggattgttattgttgctgctgctgttcttatttttatgtttttctgttgcccttctacacaacacctttgtttctgagcttttccttgtccattctgtactcttttaattttgaaattgaataacaagtccccttgtttgatagagtgttaagcaagtaaaatgaagtcagccttgaattatctaccaaaaaagaaaaaaaaattcaatgctttggctaatggggatgttccaaaatgcatgcagttttgtgtgtatggaatgttctgaatttaatttaatttcctaatagttacaatcatttgaccgagaacaggaggcacaaaggaacactaacaatagggatgtcatatgaaacaagaaagagagtatcgtaccaaagaagtttaatttacaaatgcaagttggtgagcaagagagaatgtgacccatcaccagagccaagccttccttgtttggtacaagaatggtaattagtgggacagccttctcagatggcggccctgacttgctaagcatttactacccatcttctcccaacctggtaatatgattgaagtaggaggagtgggaggaaggataaggaaacaaaagccagttcatctttgcctttaacatgattattcccagatccattcccagacctccatctcaaatgctgctttgaaatcagtctagatcttaaaggaacaccagagggagtatttaaatgtgcccaataagcaagaattatggtgatgtggaagtaagtaaacaaatcagttgattaatttttttagtttggccaaggttaaaattctaaccctgcctctatcaatcaagtttcctaaatcaatttagttcccatctctgagccatcactgtttcttatctgtaaaatgggataataatcacagagatatggtgagaatttatgctatagtacgtgaaaagcatttagctaagtgctaaatgtataataagtactcaataaatgctctcacttgcatttgattatttttaattaaacttttcatttcaagacaattgtagattgacacactcttgtaagaaatagtgtagagatatctcctgtacactttacccagtttcctttaataatatcttacaaaagtataatgcaatatctaaatcagtgtcaacactggtgctgtcaagataagagtatagctccatcactgcagggactcctcctattacccttctatagacatatccaaccctccctccctgaccactgacccctgactctgagcaaacacactcacctgctatttttgtcatttcaagaatgttgtataaataaaatcatatagtaagtaactttttgaaactagcatttttcacccatgaatattgcctgaagagtcctctttatcattgcatgtatcaataatttgtttctgtttcactgctaggtactattacatgctattagcctacccctctgctaatcccacacactagattacatactatggatatgatataccatggattgtttaaccattcacccactgaaagacatctgggttgtttccaatttggggctattataaataaaactattataatactattattataagataaaactattatgggcattcatacatggattttatgtgaacatttttttcatttctttgagattaaggcacttgcagggttatatgtgagttgtatgtttagttttctttatagaaactgccaagttgttttacaaaagaatagctataccattttctattctgaccagcaaggtatgtgatccagtttctctgcatcctcactagcatttggtgctgtcactattttttatttttgtcattctgatgggtgtgaaatgatagctcagcgtaatttttatttgtatttccctaatggttaatgatgttaaacatcttttcatgggctttttttctaactatatatcctcttcagtaaattttcccattctctagtgggattgtttgcttttgacagtttttaattgttttgacatttttaatatgttctagatgctagtcctttgtcagttgtatgtattgcaaatattttctcccagtctataacttgtcttttcatcctctgtacaaggtcttttgcagagcaaagccttttaattttgaagaggtcttttcttctttcatggcttgaacatttagtgtcaaggccatgaattctttgcagaattaattcaaggtttggaaaactttgtcttattttttataagggttgtagtttcacatgtaagtctgaaattcattttgagataatttttatagaagccgtgagttttagatcaagattctatttacttacttagcctatggatgcctacttgctccagcacatttgatgaaaagcctgtccttcctccattgagggagcacctttgccaagaatccattgagcatattcatgtgggtctatttttaagttctctattcagtgtcattgatctatatgtctgtccctcctctaataccacacactcttgattactgcagctacataataagtcataaaattgaataaatcgattcctcccaatatatggtagatcctaatgttggagatggtgactctttccaccttattatgctttttcagtattattttagctaggctaaggcttgtgcattttcatgcaaattttagagtaagcttatctatgactctagaaaactattgctagaagctaaatgggaattgcatgaaaccaataggtcaatttagaaagaattgatattcttactatgctgagtcttccaattcatgaacatggtatgtctctagatttaaggtttttttctccttttattgatatataataatttacatatttatcagtacatgtgagtgtttgttacatgcatagaatgagtaatgatcaactcaaggcatttggagtatccagcatcctgagtgtttatcatttttacatgtcaatataatttcaagtcctctcctcaggttactttgaaatatatataatattgttgctaagtatagtcactgtagtctgctgtcaaacattacaactcgcttcttttatctaactgtgtgtttgtacccataacccaccctttccaatctctggtatctattattctgttctttatgtccatgagatcaagtttttggctcccatttatgagtgagaatgtataatatttgtctttctgtgcctggcttattttacttaatatagtgaccaccaatgctattcatgtttctgcaaatgacatgattttattcttttttatggatgaatagtattcctttgtgtatgtataccacattttctttatccattcattaattgatggacatttaggttaattccgtatctttgttattggaaatagtgctgtgataagcatgtgagtacacctatcattttgatatactgatttcttttcctttagatagatattcagcagtgggattgtgggaccatatggcaattctatttttaggtttctgagaaaactccatactgttttccctagtggttgtactaacttacattcccaccaacagtggcatataagatttcctttttctctgtatccttgccagcatctgttatctttttgcctttttagcaatagttgttctaactgtggtgaaatgatatctcattgttgtgatttgtttcctttaattttttctttctaatttttggcatacatattctatacatattttgttgaatgcacctaagtattttattttcttaggagtgattataatactgtgtttttatttttagtatccacattgttcgttgttatgtagaaatgagatgatttttgtgtcctgtgaccttgctgaacacacttattagttctaggactttttatagattttttttgagattttctatgaagacaattacatcatctgtaaatagggacagtgttatttcttcctttccagttggtatgccttttatttcttcttcttgccttattgaagtgactaagactcccaatactgtgttgaataagagtagtaagggcagatattcttgctttgttctgacccctggaagaatagcattcagtctttcattattacgtatgatattagctgttgggtttttgtggatgcgtattattgagctaaagaaattttcctctattcctattttgctaagattttaaaaatcatacattggtattagacttattaaatgtttcttctctatcaattgatatgatcgtgtgattttttcttttttagtctgttggtttagagtattacattgatttatttctgaatgtttaaccagtcttgcatacctggaataaataccacttgctcatggtgcataattctttttatacattgctggatttgatttgttaaaatattttatagattttacatcagagtccatgagagatacttgtctgtagtttgccttgtttgtggtgtctttatctggttttggtagcaggacattattagtctcataaacaagtggtgatgtgttccttcttcatctgtgtataaaagaggttgtataaaattagtgttaattcttctgtaaatctttggtataattctacagtgataactctggggcctgaaaatttctttagggagcttttaaatttttccatttctgtaatggttataagactatttaggttgtctgtgttattttggtttgagttttagcagtttttggtttttgaaatccatttattctaaattgtagaatttatgagtataaagttatctgctgtactctgtggtaagctgaataatggcccccaaagatatccctggaaatctataaatgttaccttatacacacgaaaaaaaaatgaaagaaaaaggaaaaaaaggctctgcctgtgcaagtaagttaaatatcttgaaatagggagattatcctggactatagaggtggaccataaatgcaaacacaagtgtcttcataataggaaggagggggaagatttggccaaataaggaaaaaaaggcaatgtgaaactgaagcaagacactaaactgctgatgttctagaagctggaatatcaaggaaataggtctttccctagaacctattctgtagaaccagagagaggcccagtgaaactcatttcagacttcagatctccagaactataagagaatgaatgtgtgttgtttgaaaccaccaagtttgtggtaattttttacagcacccgtgggaaaccaatatattcttctttattataatgtgtcttggcatggatttcttttaatggtaagcatttctaatgtaagcatttagtgctatataatttcctctcaccactggctttagctgcatcccacataatttgatatgttgtattttcatttttattgagctctctattttttttaaaatttcctttgagactttcactttgaccatgggttatttagaagtgtgttgtttaattttcaagtatttggagatttctctgttgtctttctgttttttgttttttagatttttgttttcttcctagtttgattccattttggtcagagaacacactctgtatgatttaatttattttaaaattgttgaggtttattttatggcgcaagttatggtctatgttgaagaatgtttcatggttacttttttttataaagtctattctgctgttttgggatagagtgttctctctgtgttgattaggtcctacttggttaattgtattgttcagatcttctatagccttgttgattttctattagtcctgtcagttgctgagaagggagtgttgaagtctccagctataattgtgcatttgtttatttctcctttcagctttcagtggttggctcatgtggtgttttatatgtacacatttataatcattatgtcttcctgaagaattaatctctctttgtctctagtaacatttgttgtgaattctactttacctaatattaatatagctacacctgattttttattttttggttactaattttcatagaatatcttgtttatatttttattttcaaccttcctatattattgagtttgaagtgagtttcttataagcagaatatagttaagtcatttttttcctttatccactgccagtctttatcttctgattggcatagttaggccatttacgtttaaggtaattattcatatgttaatgcttaagtgtttcattttattatttgttttctgcttcctttgtttcttagtcctctatgtttgttacttgaatctttttagaattccaccttgatttatttatggtgtgtgagtatatcactgtgtatagttttcttaaaggttgccttaagtattatactacacatatataacttatcatagtctactggtatcagtgttttaccacttcaagtgataggtagaaatcttattttcacttaggttcctttaccctctccacttttaaaacataattaccttaagtatattctctacacatatggagcaccacatcagatgatgttataagttttgcttcagccagcctgtaagttttaagaagttcatgagaagtagatacttgattatagttattcttatgttatatttactcccattccagtattctatcatttttgagtttccaaactttcttctgttattatttcctttcttcagtcattatttcctatttagtcattgccatttttaagggtagattttctaacagcaaattatcttagttttcctttgtctgagaatgtctttattttctcttcattgataaaggattgtttcactggatatagaaatcagagttgacaattcttttagtatttttaaataatgtgcaatttctcctggcttccatggtttcagataagaaatcctctgtcatacaaattagtattccccatgagttatgtatcatttatctgtggttgctttcacagtttttgtttctttgtcttcagttttcagaagttgaattgtaatgtatcttgtcatgaatttcattaggtttattctatctgggttatactcaccttcttaaatctgtaagttcatgttatctgtaaactttgggaaatgttctacttcatttaagtgagcagttttcagtacaatgctctatttctttttcttctgacatctgaagatacaaacgataactcttttggtattgtacctcaggttccaaaggtccccattaattttttcagtgcattttctctctattgttcaaattaggtaaactctattgagttgtcctcaagttcatttgttctgtcctctgtcatctccactctactactgagccaatccaggaagtttttcttttgcttattacatttttcagttatgtcatttccattcggtctttttaaaataatttctattcctttgctgagattttttcctttttttatctatatcaagagaatttgtaattacttgttgaagcattttcatgactgctttaacatcaatgtcaaataatgccgacatatgatttctcttgagtgtggtatcttttgagtgtcagtttttatgaaggctagatcggtgtgtatgtttaactttctgttgggcaccaccaataaaacaccaataaaaatgggtcacttactcatagtgcctcattgcaaatcagtggggtgaacattcagctccccacttggtgctgctgacccttcctagcaaaagcagggcaccaacttgctttcattgtcttgattgtcttgagttgaggtagaaggtcactttcccgatggtcttcactgccacctgggagaaggaggaggagggctgagtcacacaactttgttactgcacgatggtgatagaagttcagctcccttctgggccccagtgacaccatgacagtggaaaagaagaagctgagtgtcaccagtatgtcttcagagcacctcattccacctcattgatattaagtgggagtggaggcttagcttcccactgcaccctgttgatgcagcagaggtacgtagacaggggaacagaaatatcaactgggcttattcagtgtcattgtttcagggtcattaaggaggctcaacccaccactagaccttgctgacactaccctggtgggggcaattgtagcactgcctctgtctgtcaggcagggaatagaagatcagtttccgtgtccatggacagcaccatagtgaggaagagcactgcctgcttcttcgggggtgggggcggggtggaagttcaacttcccgcttgccccactgaaacctcctaggggatgatggtgcaggtttttcctgcatgtctgactggaatgtggaaggtactgccaaaaaaggttttctgcttttacgccagcactttcctggtgttttggctaggagaacagaccttttttggagcttttcagtcaataacagatagtacatccaagatggagccttcttcagctccctgtgaagaatatgcaggaaataatcaggaaaccagagaactccccaccttgtcactcctcaagtcctgacctccctgtaaagtctgccttctccttccacatgtcagggatacatgggaaagacactatgatgatcagaaggcagaagacaggaactaggggaatgtttacgccactgactttattggggtttctgagaaaaaggcaagacaggacaagatagacagtttgggattggctgtaggggtggtctcctgttgcctagtacctggccttggggtgatcaacacagaagaatgttgtctcttagggtgtactggcagataagggaggcatgaccctagattggttagtttcatattaaaacagctcccaatagggtcctttgttatctctaagaatgggctaggccaagaagagatgtttttccccagccagacagatgtcttaagatgccaaaacattgtaatacataggaaatttaaaaatatttacaatacatggtcagtcagaagtatgggaggccctggacttgcgactggcatcgaaaaatgagagcagtcttatgggattgagactttaacctgtgttgtctgcaataagtccaggtgtttagtaagtatcagaattgaatagaattgttgaacacacagttggtatctggagaatcagttgactgccagtattaggaacccttccccagcccataccaaggcacccaaatgtgtgatcacagttgggtacctgagctttggcaggcaggcagtcatgtcaccaggtgcacatgacaaatgtcatgcatgttttaactaaatacaaggtgagagtcagaaattctcttctggtgtttagtagcaatgaagactgcacctgaccaaaaaataaaaattcacgaaacttaaatgctaaaaaaaaaaaaaaaaaaattttaccgaagagaatctttccatttaagggcctcaagcacacaacttttttcacagaagccatcttgaatgttcaacatacatagattgcttttgctctcaaaattgacagagatggggagcaggattgactaaaccagtaacaaaaaatattttagggatgatagaaatgttctcacactgaattgtggtgatggttacacgactttatacatttactaaaaataattgaactacgaaaatacaaaataagagtaataaaatgaaatttaaaagtacgcaaatagaatctgctcatttctgaattgagagcaggttttcaaacttgaattatggtcttgaaaaacaatattgatcatggctgaaccagtgtacaatgcaaagaggacaataatgcaaccctttgtccctagtgaaactcttgttaaaaccagacatgagctgaattatggtagaggttcaggctgtttgcagggctccactttccaacatggatgatggctatctcctgaatttcctaccccaagcttctcatcagggtggacctgttctctttggctacaatccactctcaagatgccccacccctgagattacccacaccctagacattatcttctagccaatcctcttctatcatttcctcttaagattccacatctcctaacatcacagcgaaggcaagatattctcctttaccccagggcagctatactgtcctctcagtcagcactgtcctagcgtccaagggaagaaggcagtatattggcttttgtcctgtggcaacactactgtagaaccagggcctgcaatacagaagggccctagaaccctacccgatgcatgtaaatattaatctcatatcagtgtttctttctgttctctccttgttagaggatcgctaaagattttttcaccaggccaaagtgtgctcatggctgccctaggctgggctatgtgaacacacttagtaggttagtaatttgatacctgatgaaatttgtgtttttgaaatagtgctgaagcacttatgtggacataagtgtgatgctgatgaaaaaaaggcagagaaggggcccaggagtgccagacttagaccacatatttggctctgagcaactcagctctggacagaatttttgtacatcttctcagcaaaataaaatgtctgctttgatctgaacacattctcttcaaagccagtgtagctatcgcttattgttactggaacacgctccaggagacctcaacttatactccaagaagctaataaaatatttctttccaccccaaacagtgctttccctaagacagcttctggtaaatgtgggttttgaattgtattacttttctacccatgtttcgttcatcaccccttctgggttagaagtcagggcaactgcttggctggtccatccactaatctgactatgtccttagagcaagattagggctccaaggtaagtcacttggctgatagaggatacactttttttctagcgtatcaatcaatagcagagagcccatgggctttcctcaatgctcaggagattggggaacatttcacactaaccttctgtgctcagcatcgtgtcagtttttcaatgagaatgattttcatgctgggaatcacagaccaggtagtaaataggtgtgatgctataataagcttttggaagtagttattttcaggaaggcttttacactctttcaaatcatgtaaataaagtagtggcccaatacaagtacaagtagtggcctaataaaagtggcctctctgctaagggtctcccactccattaccaagtcttcatggggaatatccagtgcttccatgccacccttggcagtcctcattggtgccacatgttccaacaaagttaaggagccacttgactaatgaaatccccagacaacacataaatcacaggacttttttactgtctgaaatagcagaccataactaaaataatacctgagtagaaaggttatgttgctggcacagattacctggagcatatatattgtataagcagatttgaccaaaaacatgaagggaaaaaacttatttaaaatttggtgcagtaactagctatctttgctgcttgttttctaattttattttgtgtatcttagacaaaaaaaaacccaatttcttaattccctggattctacaatagcaatttcataacagtttctctctgggaccttcttgaaaaatggccgtatgatgtgtgatgatgctgtccaatttgttctacaatattccctgagaaactgatcaacctctctgtgggccttggtaaagaagatgggaggggtgagtaagatgaggcaggatgtgaaactcattgagaccttccaatgacaagcacggtaaaactcaggaatattgtagcattttgtgtatgactcaataatcttcattaaacttgagatttttagaatgatatcagactactgaagtcactgcattaataaaacagatactagcaccccttaacaacgtaacaaatgtgtatgaatcatttatatgatttttttctcttgaacaatgtttgacaataatcagatgataatgaaatgtataattaataacaaaaatgccaacatctgttagcttgttattacagactgatttttcaatgtactatttcaaatgtgtcagcattaacctaatttatattaaaatctgctaaatacaatctgctttcattagttgttaatttggattggcacatgacaccaaggaggcgcttcctctctgctctccctccgcatttctcgcttttgtctaaaccgaagattaccccaaatgtcttttaaaaaccggctgcctcaactcaaatgttctgccagcagatggatcaggttggctggctgtttgctttcagctgtgaatgatcagttcattgattcttaaaatgtagcacttggtctcaggaaaaaggctggtccccagctgcaaccacttctgatattcttctgtccagttgcctgcttgtatgtggcttcctctcacatccgtgcactatgtctgtctcctggagcctaggccactagcagggaggacacagactctgctcacgtgaggtgcccttctgcctggggttttaaactacatgccctctaaggctcaaaggttgagggcagatctctttaaagggatgaccaccagtgactggatgttttctacaaatgaaaagcacatgtacagcatgagcctggtgcatcttgtagtgtcagaaagtaaggaaatgctctaaagaaatacaatggtgggatatgccaaaggagcacagcatgtaactgaaaaagctctcagtggaccaagctggaacaatttaaggaacaaaataaagtagtattgagttaaaacccaaaatataaaataaatatccatgaatccatgcacttatacataaaatgattgaatacattaataaactggaaataagactcaagtctcccatgcagatgaattccaaataattaatggaggttctccaccctcaaggagggaaagaataactcctcagtcctcaagtgtgggctgcacatacatagtgacttccttccaaggactgcagtatggaaaggagaaaaaagagaaatgttacagtggaaaaacctgacaaacattacctcaagcacgtgatctaggccaatatcaacagtcagaagtcatgttgatggcatgtaactttgatatgatgtgatgaaaatggcactgtacttctccagtcttcctctcaataacccataaccctagtcttatcatgagaaaaacatcatgcaaattccactggtggaacactcttaaaaatacctaatgagcactcctcaaaaactgtcaaggtcaccaaaaacaaagaaagtctgagaaactgtcacagccaacaggagccaaaagaggcatgatttatacatttaatatgattttctggatcggatcctggaactgcaaaaagacattgggtaaaaactctggatatcgaaataaactatgatgttagttaacaataaggtatcaatatcagttcattaatagtaacaaatgtatcatagtaatgtaggatgttaataataggagacactgaatgcaggggtatttgggaagtctctgtaatgatcttctaagcttttttgcatatctaaaactgctctataaaataaagtctatatttttaaaaagcacatataattttttgaagaaatattggacaccagggataattcacagtgtggggaaccaacaggcttgagcgaggaaagattcccatgcacgagtcctcgcaccatctgcagggaaagccctgcagatgggactaaccaaggtgtctcaggaagagaatatgtaaagaattggcttgtcttaagacacaaatatatcggtctgtaatcttcaaaatcttgcttgctgtgttttctagagcagctcttgagatcctgcttatcttcaccttagagtgaacttgtgaaattatctgagcttgaacggagctcaaagaaatgccccatgtgctagggaaattggtgattctcttgcaggtaggatgtcagtactctcgaaacagcttccagtgcacttaagggatcattaaaaagaaaggtgcttattaattgataagaatgaattttgtacgtctatgagccttaggtgatgtattggaggtattgctttctctcttacgaactgagggtcgtcagggtggctgactcctccctagtgttgaagcaaaagtgttgttatataacgcgtttcttaagtcagcgttaactagtcacaaaaaacatcctaatcgtgtgcacccaaaggaatatgatattaacgttaaatatgaccacaggccagtctggaaggaaagctgaaaattacatacctttttttttttaaatcgcttcttgaacagaaagtggtaataataatattacacacctacacagcctattatattcaagaaacctcaaagtccttcaccaattattctttatatccacagggctcacatttcttgggaaaggaagtcactagtgataaaaacctggtccccagtggtcgtccttttcaaagccaagttaaatggagcggagtgggagggggaggagttgttccatttccccactgctgcttccgcccgagggctgccgcagtatccattcctctcgcatccccttcccacctgcatgtgcagcttggggatcagggtgaactaatgaatggccatggccagcagcaggacagcaggaaacaagaaccacgtctagaaatatcatggctttaagcagattttaaaaaaccagctactgttcaagatgcagggctgagaaagtgcgagaactgagtgtgttggcaaaggatctgactgtgactcggggcctgttatttgctgttcttgtctgcatggccttaggaatttcagtctccctctctctctcacactctcactctctctctctcttcctacagtttctaaaatccctaatttctaattcctgctttgtgcttagggaagtacctggagtgaaggttagaggaatctgcattttggtgaggcttggatccaggctaactgggctcttccaaaggatccagaagtttggggaaatgtggctccttttatgaagaggaaattgccctggctttaccagcttaattcctattgtgtgttgcaggacatcacaggctcttccacattgcttcttcctcctctacagccatatttgcctttacacctcttgcccttccgcctcactgaactgtttttagttcctcccaatcataggtcttgaatccaccactccctctgccataaaacgtcatgctccccacactgcccactggtattcctcactctaaaacactcacccaaaatgtcactttttgataatccccagtctggcattgggcactcctatgtggagagctctctggatgtgccctgttgtagcacagtgtgtgtactgtgcttcacttggttgccttgtcggcctcccctgctagccttgagggttgtatctccagggctcagcacagtatctgccacaaggtagccactcggtaaatgtttgctaaatgaattatgatctgtttccccagccttcttaatggaggaagcccacctaacttaatgataatgacagcatcaaatctttctgtagtttagagacaaattgatggccattactttttggtacagatatgtcatatgcctgttaaagtggattctgaatcagccagtgctggtagaggcattaactatggacaataacagaaatagagcaagtctgggctggaaagaaacataaagatcattagttcagccctttgcttttacagatgagtaaactggggtgcagagattaaacatcttggtgaagatcattcagactctacgtgatttttttttactcaaaacccagtgctttttccactcttctgtaccatgtgacagaaacagatgcacacacacacacacactagctgctgagcatacactgtgagtacagcagagggtatgccttttcggacacccagagtcacattccttgccctcaaaggcttcactgtctagttggagaggccaggcttgcacacatctagataggagcaatgtaggaatctgagaggagacacaggggtcagaagacctggagtggcccagccgggagtctgtgagagagagcacaaagggaatgatgttgtggagcagcaagagagggaaccatcacttctggggggacaggactgagtatatgatggctgagaaaagaaggccatctccgaaagggcaggaaggcagcaggagttgggatgatgtatggttttatcctgtgattttactgtgaaccacttcaaatagtgttttggaaagtggtggagcagctagatatattgagagagagagaggtaaagatgaaaatggagaaggaaatgcgggaagggatagggattgcaatggagagtaagatagagatgaagatggagatggagatagatatacagacagagatggaaatagggagagagagagagacagaaataggaataagagagagagaaataggaacaaggttggggattatttcacaattcagctacagcaaggattcttcaagcacatgaggaaaggaggtgtaagtttctactatgtcttatatgtgagatgtctttttcagcagtagctgcatgtgtactgacaagaagacctcctgtagaatataccacatgcagtaagtgcagaggactctttaagactaattactgtgaatgaacttgcctttccccactacgtaaagtgtccagggcctgcatttccactgctttggaagatctgatgaacagaagaaaatatatcttgttgcacagtgtagactctcagtgtctgcagcatagcttctcatggcaggtttgaaagaggaaggggtgaggcttagctacaagcttcaaataagtaacctagctgtagcatgcaacatgagagcaggtcttctcaaacttttatgtacttgctaatcacttggggattttagtaaaatgcagattctgattcatttggtctagcatggggcctgaggttctgcattcattacaaacttccaaggaatgttaaccctagacataaaagcaagatcctaaagcatgtctttttattgacaggcagtagtcgtacatatcatggagtacaaagtaatattttgatacaagtatacaatttgtaatgatcaaatcagcataattagtatatctgtcacctcaaacatttatcatttctgtgtgttgggaacattcaaaatcctcttctctagctatttacagatatacaataaattttgttagttatagtcactatacagtgctatagaacactagaatgtattccttctatctagctgtaattttgtatccattaaccaacctcttcttattctcctctcccacccttctcaggtcctagcaaccacaattctacttctctacttctatgggttcaatgtttttagctcccacatatgagtgagaacagccaattaattccccgttgtctagactagtaagctgcatccctggctatatacctggggagcttttaaaaaaacatctatgccaggtctcatcttagtcttttctgtcttatttgctgtgaaatggttaaaaaaaaatcaaagatcaaagtgtgtgcaccattctttattctcccacttaatatttactccttcaaatatcatgtaatttaaaaaaatcagtgtcctgcatattgtggacttgcaatgcacagttgaaaaatgagtgaaaatggtatacagatgttaagtgcatacacaattgcacagttggcattcaaagtcattgtgtcatgtataatgccatattcatttaagtaaaattgtttacttatgataaaatcgaattgcctcaactatgcattttgaagcaattaattctagctttctgctcacttacaataaggtggttactgtggtttgaatgtgtcccctcaaaatgtaggtgctgccaatgtgatagtattaagatgcagggccttcaaagaggtgattaggccatgagggctcctccctggtgattgggggcaggtgcccttacaaaggggcttgatggagggagtagcttgctctcttgcccttctgccttctgccctttgagagtgtagcaagaaggccctcgccagacaccaaatgccagcaccttgatctcagacttcccctccagaactatgaaacatacatgtctattctttataaattacccagtctcagatattccattacagcagcaccaaacaaactaagacaggggctttcccacatcaaatagtttatactggcgggtcttagagataactgaagtggtttgttcctgttcccaccaactatcagtgtttcttttgggggcctgatttagtctctgaggactaagtgaagcttcataacattaggacaaggcctaaaattagcatattggagatttttcagggacacagcatgctgatctgtgtgtctctaaaagggcacacacatctgtttccaagacaacaaaagaacatccactctggtgaagatattgacatcagcctgtccaggaaagagagcatgtgggtgccggggcgtcatctgagagttggttgggctccaaatctgtttcgttgctggcaaccttgatgatccacagagggataaaggaagtttggcctaattatgtgatgctttagtcccttattggaaacatctttaaggaaacagtcaagttgtggaaaatgagcgtcacttcttctccctctctgaaggcaccagggtgagcacaggccaccatgggtattttataaaacgtttaggaaacaataaaaccttccacaatttctccttgtccagcccactccctggccttctctcctagccttctctttatatagactaacttacttggagattggcaccaaggtgctggcagaatgggtgtgggatgttcttttagataggaaaaaataagcccaaaaacaaagttggagttttttttttcttcttcttcttcttctcacttacacaactcaacacaacacttctgacaccaaatgtgtgggggtttttccccacacaccaagcagtacctcagcggacaccagctggatgtactataattcattccagccctggcactgtctacctggagatagcatcaggtcacacaggttgagggctcagtcccacaagactgtcccacttcacatgccaatcataagccccgggtggttggcctgtgcttctgaccaaccagctatacattgggattcccacaactccctcctcaggttccattaatttgctacagcagttcacagaaacccggggaaacattctactgtttacccatgtattataaaggagactagagaggacacaggtgaacagccagatgaaaagatgcataggctgaggtatgtggggtgaggcaccgagcttccgtgtcctctcagggagccccactccaggaacttctgcatgctcagctatccagaagctctcctaccccatctttctgggtttttatggtggcttcattatgtaagcaggattgattacatcattggccattgaggatcaaggcaaacttcagtcttctatcctccccagaggttggagggtggggccaatagtcccaaccctctaaccttgcctcagtctttctggtgaccagcccccatcctgaagctatctagggactcccagccaccagtctttcattagcatacaaaagatattcttattactctgctgatttcaacggttttagaagccgtatgccaggaaacttaccaaataaatatatagatttcactatatcacaagtgtgtgccaggcagcctgaaggatgtttgagatcatagtgcctacctagacatgagaacggactgaacgcatttagaaatatctccatttttaaataagaaaaagacacttaagaagaaggaaacattagtggaatcatttgggtgactgagaaaatctcctgatggcattttcaggatttttagagtggaaagaagaaaatcaaattgctgcagctaagctggaaatgttctggggacagtgtgattctgaatcactgtacttctctctaagccccaagggctgattataaacggagccatattcatacttgagaccaggccttcactttctcggaatatgatgtcaaaagcagccagggagttcaactttaggaaaaaagtggaaggaaatgactgcttgtgtgcataggactggatttatgtattcactaggtaaatgtgtcccctttggcaaaatatgccatgagctgaaaaatgtatcactagccaccatcttctctgagagaaaactgtggtaaacaaatttcatgaaagaacaagattttcagagactaaaaaaggttggcatttaagtttcatccaaactgcagctgtgaccaaaaataatcaagcataactgtggttaattgtgcagcaacctacaccctccatactctgctaaatccctaggtgatcgttttgaggttttctttttttctttctttctcatcactgctgattcaaagacaggtacaattttagcttagtacgagttttccaaagacaagacaaagcaacatagtttggctatgttgtctaaacgttgtaatcacaattttcctatgagagcaacattttggatataaagtgtactttacaatgtaataggctttaactaccaagatatacacctttctaagtaagtcctattaaaacaatttaatagcgtgtcaacaagtacaaacagaattgtgcagtttgttttcatgcagtgagctagtttagccggggtctgtcaagtgctattgaagctcactttgaactaacaggattacatgatcggaattgtattcatggaaggtctttattcttagtgctgacagatgaaacgcatgataagttataggggttacactaaagaagtattgagtatttttgtgcatgtgcaaaatgtgtaggttcacatacatttccatacttaacagacgtattgatattttagtggcaaagcacatacattttaaaaagaggagaaaatagaaacatgttctctcttaaatcagcctggttaattgcagatgaaactaaattcgcatattttgactctttaacgttctattgaatggagttttgctaaatcagaatttacaacaggcatgcccaattcaattgtgggcaaaaaaaaaaaaaaaatcagcactaacagccttattggaagcaaattattcaatgaatccaaatagcctgaaatattctacagattgtaagatagggctagcttcctatacatatttgctcagaaacaaagctgtggaacactccctaactgtgaaggagagacttaactttccatccctaagcagggacagagtgatagtggggtgctgaatcatcctttccgcacactcacgtattctggatgatttggagcatatgaaacccaacagaaatgaaaaagaaaaatgtaaacttacttgaggatacaaaacacaatatttatatgtaatatacacccacctgtgtatttatgtgtaagtagatactgtatgtctttttatgggcctgttttcatatgtcagtataatattgatgatacaaaatatatacagcaggtcctcagataacatcattttgctatgatgttgagaaaaaaacatctatgccagccagggccactgtctgtgtggagttggcacattctctccatgtctgcatgggcttcctcctggtgctccgatttcctctcacatcctaaagatgtgcatgttaggtgaaatggcatgtttgaagtgtcccagtctgagtgagcatgggtgtgtgcgagtgtgccctgagatgggatggcatcctctccagggctggttcccatcttgcaccctgacctgccagggtagactctggccacctgcaaccctgaactggaataactgggttggagaatgaatgaatgaatgaatgaatgaaaatttgtaaagtagacggtaatcatacaaatgcacttagggagcccgccctatttgtaattgcttgtttttgaaggtatgatcgtaggaggtgctcctgacaactttcacttcacaaacagttattccttgatgcaacccagcacctctacagcagccggcactcactgatttaccaaaaattgagtaaataatttttaacccgatgtttttatgacttgttttattaatcattcttaaatgtgtgtatagctcacatttatttcagtatttaatattagaaggttttgagtctttaattagaagttcggtgatgtttttgtgaccagaaatatcccacaggaacttaactcttgtttatatcaattagcttatggtaaaactacttttttaatatgtggttttacttaaagttgcagtttccaagaaaatattgacaacagcaagtgaggaccaactgaatatgtagtacatctatatttgtatttatatgtgaatacatatgtatgtctatgtgcataggactggatttacatattaggccactttcaatgggcctattttaatatgtaatattgaagtcatgaccataaagaacccatttaaggtccttcctgcagctctatgtctgtttataatggcataaggaagagaacagctatgggagagtttaggtataaagcattgtgtacagggctttacgtgtcacttaaatagaagcattgagccagatagacagatggaagagacgcatctcagatacatatctgtgggaaaaatgtactaaaaataaatgtctgacacaaatgtcaccgagtcattcaaaactgaactacacaagccactgggacattatcagctaacataacagacatctaacaccagtcaaagtggcctgcacaggaaggggcttccctcagagaccttcacaaaaataaaagaagaaaaaaaaagtacaagccagaagtcatcaaaagacagtgctacatagccaggtgttgtggcatgtgcctgtagtcacagctacttagcaggctgaagccagaggatcgcttgagcccaggagttcaaggctgaagtgcactatgatcacacctgtgactagtcactgtactccagcctggactacagagcaagaccctgtctagaaagagaggggaggagagagagacggagagggagagagaaagagaaagaaagaaaagaatacaagttttgtgcaaatggttgcaggaccaacagatggcggttcaatttcataatagaagccaaatgcctacaacttttcaaagatattgctatacaatagctcgtggaggcagtttccaaaatgaaaagtgagggctaatagtgtactcttaaaacttctcaactagcttagagtcttcactgaagaaatgttgtatgaagaagtatgggttacactgaaagtatttcttgtgaacatagctgcttactatctcgagggaataaaacagaatttggaagctggattattggccccacatgccctcttctcagctaccaccacctctgcatagacaacatatactgagcgcctggatgtgccagtgatgtgctgagtgctcacaggcatcatcagatcttatcctcccagcaatcctgagaagaaggttctagtattgggttaactgacttgtgcaaagttacattgctagttcagtgcaggattcagtagacccatgtttgtagttctctaaaaacctagtccataaaagctggactggacactatctcatctaacagtccatacaccaggctgtagatgaagatgtcaacatcacctggggaggggcctgttatgcaaaaagcatggcaacctctctgtccaagaaaccgctataactatgtgggaactcacagccaaatgacttttgctgaattcatatttaaagatatgccacctggcacattaaagatgctctatataaatactaacattacatatgtatatagcaaaaaaattctaggcatagctgacaccaagctcggtaatgagttgctgatttccctgtcaatagattgaggtacaatgaatttatatagtgattggcagcacaggaagctttcatttcaaatctcacgtttattaactcacttttttcttcacaagaacattgtgacataggagaaacagttattctagttcccctatagagaataggaaaatgcagattaaagagatgaagcaattcacgaaaacaacaatgctaagtgccacactgacctggggcaaaagtccagggtgatattgctttctctgctgcatctcaagtctgctcaattcatactaccccactgagaaacaggaaattacgctcaaatttcctgacatggtataagaagaaacttaaaaattatctggaagtcagtgctgatcacactgcatcattgattcattagaccagtcagtgtttgcacctgttctccctttactgattgccagtgagggtgctcgtgattgtctatgtgctatttctttgtttctgggcacattcataattttcagacagagctttaccttaatgacatgagtggcaaagttctattttccttttctcttactgaatcctatgagctaccaaaaaattcctaaatttgtcctgggcatgatggctcatacctgtaatcccagcactttgggaggctgaggcatgggagtcgcttgaggccaggaatatgagaccagcctgagcaacagagcaagatcccatgtttaaaaaataaattagccaggcatagtgacatgtgtctgtcatccctgctacttaggaggctgaagtgggaggatcacttgagcccaggaattggaggctgcagtgagctatgatcatactgctgcacccccagcctgggcaacagagcaacaccctgcctctaaaaaaaaaactagtaaacttctgttagtacaggcaacataaatcctgtcctcaaagagctcctatcagtggaaaatagcctgattcctaatccattcatagctgatcttattgggaccttaaaaccagagttaacccatccttgcttgtgaatcttaatgcataaagagtgttctagaatgaggcaaccaccaggttcttcacataccctgcccctgttttcaatcctggtttattatcaggggatgttctgggtcagacctgattcagctacatctgatactcgattcatgtcccactctagatttgacaacctttgtgatgttcatctcagcaattttgcaccttttgtgccctgcacattttctgatacactgttgagagtaacatttccaattgtttccatttaagactctttgctttggtatctggtctccaggacacctgtgtgatccttccttcagcccagatataccagtcactcccttatgctttacaacaaccacatctttcccctgcctggatatatcttggatgatcagaagtctacgtgtccttcaaaaatggcctgcttaaaaaaggaacgtttctctaatttcccaagtcagtggtgatctcatcctactcttagtattcataagcttattttctgaatcattttttgccatacataatatactgttctacctttactgggaaattataactcctggtggtcaggaaatatttcttacacttggaattccctgctgtctttaaaaagtactttgcatgtagaagcttcattcaagtaatgtggagtgaatgagtgcttctgatatatagaaatatgagagacaaagaggagaaaaaacccaaaatctattattttcaagggatattcccacctggtctttgtgtggttttctgtttatagggagctagtaccttaagggttaagatcagttttaccaacaacagcagctgttcctggaggagctcaaggacattatgagattagcaggaataggactttgaagtctgtgctagtctctggaattccccagaccccctcctcaccccgcctgcccgctccgctccccttcttcaaaaacccacccgtctccaatttcccgagagtgttaaaaatgtaactgtggaatggtgtagctagataatgttgagtgtttttgcatcatatataaacagaaaagccttgggggcattatttagtccacttcacgtatagactgctttcccttggtgcttgccattgcccagtgagacgtacagattttacatgtggcttgtgcccagcctgtctctaaagaaagcaaggtccaaaggaaggttcaaggactggcttcgtgctataattggctcattggtgtttctcttatttaaggaaatgatcctttttgtctctgctttgcttcagagttagatagacactcataaagctgttccccatcagtgagtggaaagtatttttgaggagctctcaatccagctgcaataaagctagggttaaatcaaatcatttttcagtgacagcaaccaagattatataaattttgaaacatacaagagcctagcactcctcgtacctgagcttatggtgccaagaacttaagaatgttgatggacttactctccatgcgtacttatcactcccagttctccttggctaggaaagggtatgataaaaatagttctgtcttcttagcaggtaaacatgcccatacacctggcaaggtataattgagagaagatcagtttgcaaggaaaatgcaagataatgagaaattttcttaaatcaaggctgaatcactctttacatagaaaaacttcaaatagaactttaacctgaagctattcgcatgtaagcatgcttaatgtgtgatggaatctgcacataaaaagaaacttgactctgcgggaaataatagagactcttcaaatatgcaatgaaaataaaaatcacaaaaagcagagaaaatcgactgctggtgctcattccctaatactcacgcattcttctcaaacccagagaaaatgccaactctttcatagcaagacctttagagaacagagctgatgcctctagtgtttccttcatttgttgaatgttcttttgattgacttgctcctttctggctaagcagagcttagtggttctctaggagccacttagagacccagagccattgcaaagctttgcctaaacaattgcccaatacttattatctttgtgattcagtgaggtgcttttaaaataattatttaacatggattactaatatttcatatgccttgcccatgcaacaataatgtacttcttagtagtaaaaatgtatcttatatttctcttgtatgccgcatagtaaacagccacccagagggcatatatgtacacagaaggcatgcttgtcatatccacgaatgaacgaatggaaaattaatcagggattaaaggcccttgccgtcattcatttcagaatcaatgcaatgcctcattagtatattcagcacaaatctaatgagacttacattgttcctggcactgtgctgggctctgggaattcagtggtgagcaaaatggcgataatccctagccttggggatttatagtgatataaaatcttatcttccatgttggtgtgattatgaatcttctacaagggtcccacaaaattagtgttgtcttcacctaaaatgaagaagaaagaagggatgatgatcatttttccatcccgaactgcagggctcttcctcttttagtttaattcagtggtgctagatcaccatttataccactttttaaccagttttgtaattacagttgacccttgaacaatcaatgcggagcttaggtctgccaactccctggtgcagtcaaaaatccatgtataacttgactttcccaaaacttaattaccaatatcctattgtgaccagaagccttagtgataacataaatagttgattagcacatattttgtatgttatctgtattctatagtgtattcttataataaaggaagctggagaaaagaaaatgttatttaaaaaattataggggagagactatatatataccattcagtaagtggaagtggatcatcattgatatagtttggatatttgtccccacccacatctcatgttgaattgtaattcccaatgttggcgattgggcctggtgggaggtgattggatcatgaggctggatttctcaggaatggcttgggccatctcattggtgataagtgagctctcactctgaattcccaggagacctagtcatttaaaactgtgcggctcctccccccactgcctttctctcttgctcctgcttttgtcacattaacatgcctgcttctgcttcatcttctgtcataatggttaagcttattgaggtttctccagaagctgagcaggtgttggcaccatgcttcccataaaacctgcagaaccatatgccaattatacctgttttctttatcagttactcagtctcacatattcctttatagcaatgcaagaatggcctaatacaatcataaaaatcttcatcctcatcatcttctcactgggtaggctgaggaggaggaggaagaagacgagaggtttgtctaactgtctcatggtggcaggagcagaataagtggacccattcagttcaaacccatgttgttcaaaggccaaccgtatatgatacatctttactctttccctccatacctttcttgatctcttactgaagaagatgtagtgaattttcttgaatggtttctacatcctgcaattcaatggatccgaacctagctgcacatccaaataaactgggaagcttttaaatacattacagatgtcttggccttccccataaggattctgattaagtggcctgggccagctttggacatttatgtgtatatttttaacttcccagggattttgatgtgaaaccagggttgaggactgttgtcataatttctctctccataattatattcttaaatctctctgaacagaaagtcaataacaacaagaaaataatatgtatatgtgcattcttgctataaacacttacaaatgtcttaaataagaccacaagaagtccaagaaaatcaatatcttgttttaagtgagcattgcaccttattttaaatattgcaattacattcgcttccttcaaagaagatgaattataagttcattattagtatttagaaaacatgtgggaagagcaaaggtcttagaattacacaaacaaaaccttacaaattattaatgtgttcttgaagctctctattaaaaagcatctctacaccttagctttttcatctgtaagctggggatgctaaaatgaaaactcaaatacagttaatcctcattattcacggattcagtagttgggaattcacctacttgccaaaatatatttataatttcaaaatcaatgtttgtagcacttgtgcagtcatttctggatttgcacaaagtggtgaaaaatgtgagttgcctcacgcattcattaccaggtgaggttgagcaaggtgatgctctgcctttttatttcagctctaatactgtaaacacatgtcctttcaacagtttatttaatgccaccttttcacattttgctgttttaaatggctcccaaccataatgctgacatactgtctaatgttcctaaacacaagaaggctgtgatgtgcattatggagaaaatatgtgtgttagataagctttgttcacatttgagttatagtgctgttggctgtgtgtttaacactaatgaaccaacagtatatacgaaataaggtgcctttaaatagaaacacatatcaaacaaggttatgtattgatctgttgacaaaaatgtgaccagaggctcacaggaatctaaccctgtagctcccctaagaacaatggttcagtatttgctaatgctgtgtttgtggtgactttatagaacatagctaccatgaataatgaatatttactgtgtaaagtgtccagcgtggtacctggcatataattcttagctagaaaatttggtttctgtgcccttctaatacaatattaggattttcaccttaaaattattttaaaaataagttcaaatagcaatgaacacacttactctatttgtatttaacaatgtattgtttctttgtctgtaaggataactctatgattgagcttttgctgtccagaattgagcctctggaatggctaggcttctaggaagccttcaaacttgtttgcttgtttttaaagctagcaactttttagtggtaaagcattatctcagcatcaaatgcagttgatataagctgcatgcacatgagacccctttgctctgtggaagggaagagccccttgatgatcaatactaagcttgccttttgcaaacagctacaaaacatgcacaagagaggatggtgatcagcatggtggcatcagttagaagcagagacaggagtggaaaccagtatacactcggatagtggaaaataatgagtgacaaaagtgacagaaagagaacagctacatactattaagaggcagagaataccctgtgtaatgtctataaccccagaaagcatcaggctgtgttgttgaaattgtatcgaatgccagattcacctgaaatatgctactctgtataatgggatgtatgcaatctctgtagtggatcagagcattgaagaaattgtacagtttgattcattttcctttagtgaaaagcaaaaagcagaaattaaaaagtaatgctaacatttatagaaaaaagtgattgagcacagacagatgataaagagtgaactgagcagtaagtttttaagtcttactgttaaaattaagaagagaaagctgttaaatatttgtaggttctgagtgccttaatacttaagagttctgtataaagaaacaatatgattctccacgtgtatatgctttatgtatttgagcagaatttcatgattttcttcaactcgtttctactcatttttagctttttcctatgtttttaatattattaattttgtcatgaacagaattttcttccattttaactttgaactagggattacaggtatataaggaagttactaatttttgcatttcctaatattcttattacatgtattttacaatttaattcagaaagaaagagaatatatctaaaaattataatgcatgttctcctttttctcaacatgtataccttttttaatcataggatcaaaacttttttatctaaatgtaggctaggattcatacaaaaatttaatccatttagtgacagagggcttcatttcttttttttttttttttttttttttttttttttttttttttgagacagagtcttgctctgtcacccaggctggagtgcagtggcagatctcggctcactgcaagctccgtgtcccaggttcatgccattctcctgcctcagcctcccgagtagctgggactacagggaccccccaccacgcccggctaattttttgtatttgtagtagagacggggtttcgccttgttagccaggatggtctcgatctcctgacctcatgatccgcccacctcggcctcccaaagtgctgggattacaagcgtgagccaccacgcccagcagggcttcatttctttacccttactttaatgtgatatttgtaatgtcttattataagaatgatagtggcagttggtttgagatatttttatgatgcaaatgaagttttattctttatatatcatgttattgacttataaaaatagtaagatgttaaattttatccaaaattttcaatacctcttaataatttcttacattgtatcctttgaacaacagaagtaactgatcatattaatagataggctaaactattcttgctttcctgggattagaggtagaaacctatgtggctataatataatatttttctcaactcttacacgccatcaagtattatggtaagggatttttcagcaggaaaaagaaacattactacaaaagatacatagatggactgtaagatgcttctcaatttcaaaaatattaaaatgtgaaaaaaatatgtagcttagacttaaagaagtgatataagacccctgaatttaagtttcaagcatttattttgaattttagcaacaatattcataaacgatactggacaaaggtacttgtgtccaattttggtgttggactgcgcaatccttcccccctcaactaacatctaaacattcagtctgtcattttctagtgtctgttatgatatcttacatagcaattgttcatcacattagttagtcacaataatccacattaagagtagcaatttgtattaaaagaagagcttaaattatattaagcaaattatatttaacaaggcataggagactgtcatttaacttccctagatccacaaacacacacacatatgtgcacacaaacacacatacccacacacacaacagtttagaaaatataaaaggagaaaaaatatccttttaaataacaacaaaaatggtaaagaatgtgcttaacaagaaagcttcatgatttttacgaagaaaactttaatattctattgaggactaaaaagggcatactttatcagtattgtaaataggtcggttttcaaattaatgaacttatggaatccaaattaaaataccaatgtaatattttaaattagagaaacaaaatctaaagttgtcatgaaaaaattaacacatatgaatagtcagagcatttccaaaatatacaaataatgtgatatatcactcagttagtataaaaatgtatttctacattaaacaatttgattttagcacattatatacaaatgggtcaataaaataggatagagtctggtaatagatccaagtctattgagaatatttagtatatgataaatattatattaaaatcaatgaagatacaggaattgatcaatgcaattgtattaggaaaactagccagtcatctgcaaaaaaagtaaaaaataaaaataaaatacctatgtctgtgactaaatacagatagatatatgaatcaaatgttaaaaaaaattaaagtattataagaataaataggatcataatttttacaatgtttttattttttgtcatttacaaacttggagtggagaagttctttgtaaacaagaaaatgacgactaataaatttgtttataaaaatcaaaagttttcatgtgtcaaaaatatttctaaaagaacaaatgacagatttatatttgcagcccatgacaaaggtctgattttcctttacatatacaaagttcttaaagttcacgaaaggaaaggactaaggtcatgaatacacaggttactgaaaaaatatgaatggcttctaaataaatgaaagatgtttaacctcacaatttaaaatgtgcaagttaaaataaatttttatacccacaaattagaaaagtttgattatacatattggtaagagtatttgaaaacagataacctcattttaatttgatgtcccttcttgaagagtaacttaagtgatacatattaactttgatcattaccaaaagggattgtcattgtcaatcttgctataaccaatcattgtttaatctcataggactccattttttttttgtattatagactccacttacctgagcatgttgtgtggccaccaagacaaagtaagaatattaacactttaaaaaggaggaaatagttgctgaataggcaatcaaaagtgtctgccttagatatgtactacagttatccccaatcaacataataaaaaaaaaaaacctgagaaataggtaaagtcactttgtatgtggtcatacttcttggaagggaccgtaagatatttcttgaaaagttatagtaaatgcctgggaataatctaaatgtgtatgaatagaggaggcctaattgaataaattacagacctcgacacaatgtgataacttgcagttacttttttaaacatggcagatctatatataactatatgcaaaaacctatggtatgtatctaaggttaaaaaataagagtagcaaggtacaggaaagcatatatgggatgtggacaaacacgtagacccaggcggatgcaaaggcttgtatgggatctatttgcctatttctggatagataaacaagtaactattaacagaatttgctctaggaagtgactggggtcttgggaaatcttactttctgatggacagtattttataatatttgattttttactatatgcatgcattactttatcaagtaaaacatctagtttattttaaaactatttttgatattagaagtgattttttctgaatctagagtgattcataaatttgctgaagatcttgaaaagttgatttttcattttatttctttacacttgtttggacagcataagggagcacgttttcaaatgaaaatttgaaatgaaatgaaaataatttgaaaagcaagcaaagtctgctgctttcatttcttaataaagttaggttttggataaagaaacacagtagcatttgcctaatgtcttctttgagcaaaatggagcaggtcggttttgaaccctcagccacagttatcagttcgtttccatattcacttaattttctaagaaaagcaactaaaggaaaagtggaccttctttcctggtcaactttagataccaccttgtttcttgcacatttgtttaagagagatttacctgacaggcgtcttcttcccttcctactcagtaacatctccaatatgcaattccctggggaaactgtttcctaagaaatgtatacaaagattggcttgactctatttggttttgaggtagcctgttgtaaatgcctccttttacatactttcacatccttcttttttactacttgaacaaaaacaaaataaaagttggtgatgatgcaaataactgatgatgtaatctctgcctatgtcagagttaagatttctgaaatatattttagaattaagatttctaaaatacattttggctttgataccttggcactgctctgctaaatctacaatccttaagattttctgggtgaggggtgaagctatggaaactgcatgaagagctggcttctcccattctctcctgaagggaggaactcagagagaaaaacagtattagtgaaaagctcattccaggaagtgaacagaggaactgaagctttggctctgtgggaaaatggagactttgaaggtaagactgtttgtgcgtccaagaagaataatgaccagcttgtgtcctgagaaggtgatgctagagtccttttgtgcaaagcaaaaccgcgttgcctagttacagagagatttttgctctaaatgtcaaaagtgcgggcaggagtagaattagaacccatgtctctaaaaggaagcaaatgttttaaaaagcaatgctaacacaggtatttcagttattcaaacactcttattgtcccaattggagaatcagcctagatatcttgcacagatcactgttgaaactgctcagttgcttcatttcatttctggcattcctaacagcagcaattaatggaggctccttcccagccggttgttacagtcttcagatgtggtctgcaaatcccagctatgcatctgacttgcctcactggaagcaaaaatggagtgagtggagctgtatgttagagtgtatcagtgggtgtctgcggtgtctgggaaagcaaacatggagggcagtaggttgcagtagttccaataggctctgcatacagagatgcaatgttggagcggggttactgccaccatcactgccccatcccctcaccccccaccccaacaaacacacacattggcagtcagaatactgtgcgtgtggctgtgttgtttcctcatagtctttgagtgacatctccaagagcaggactagaagtggcagaatgacaatggcaaatccatttctgtgatttttgccatcttctttgagtgcaccactgaaacttcaaaataaccaagtctgtatgctattccataagcattcatctcagttttatcttctagtgacagtgttttacaatcagaaaggccagaaaattctgttattagttcacaaatttttgtgcatctttcttagaatttatattcctctgtctctgaagggagacctaaatgtgtccaaatacattccagcaataacctgccccattaggcattctccacgtatacatatttacatcatttgttgggagtttatttcttctaaacttatactttaaagaatacacgacttcagttcaactcaatgcatatattttggataccactctttgcaaactttgagttgagtagagcacaaaagactgttttaagcagatggcatttcacctagattgagggggtaggtcgtgggagagaaaaaggagatagaagtaagcagtcattattcatgcgtgtatgagcgcacacacacacacacacacacacacacacaccatgaatcatttggaataataaaagttatagaaatggcaaatcaaggatgtgtattttgggcataacaaatagtttagccaggaggaaataggctatactacatgttggcaagaagtaggctgaaaaggtaagttgaaaccatatgccagaaggcattgaagatcagagtaaagtactcgtaattaaatttcaaagcaattttaatgatcaacgtgagataatatttaaaaacgtttataaggcatctaacagtgtatgttacagtgcaggtactcaataaacatcaactcccttaattcagtgggcagtgggagtccttaaagattacacagatgctaacaaattccaggaggaatgttccaagaacattgctcactgtgaaaaaggctaagtgtgttcagtaatggaaaattactttgttccagctagtaagatgcttgaaatgtgtaattccttttggccagtaaactgtttatcctgactcaattcagtgtcactagaaccaaattaccttatttcctgatcctgaattaatcttggattgatctctgaagtaacaaaattaggattttgctttgttttgtttctgcaatagtaatagggttgggagctttgaaaagaggcatttacttgtaaactattgctagtcctaatggtgcccagaaatgaaaaaaatatacaacttagcatcatagaatattagaactagaggggagtatagggaatacagtgatcatagttcttcaccagaattctggaaacgacacccctcagaagatcccgatgttttgtgaattcgaggcgcctgtgaatgtaattcgaaaacagagttgctagaaattccaagatattctaagagtttggataggagaagagaaagaaagctagaaaatgtcactctctttcagaaaatccaggcacatggatgtggtaattaaattcatctaacccagctcttttgtttggagatgcagaagttcagccctagaaatgtaaagtggttgcccgtggacactcagactactaggagcgcttgtgggatcagaatctgagtcttctgacttttggatctattcttgttttactaccagacttcatcgaactttttcattttgatgaagtagatattcttcttatgaataaaaaatccagaaatcagtgttagaacaaatctgaagataaacggcattgaatatattaacagagcctcaaagcaaaacagttttcatcccatggtattatatctactgcagataccattatttatttatagctatttctgctcaactatcatacatttatatatacacatacacatcaaatgatgacacttgtcttacttttttaaggtgcctatcttatgctttacaaatccaggcacaacagaggaatttgctctgcttggattattttggaagattcctcacctatataataactgagctctgtttatagaatatttaatgagctcttaccacatgtgccaggaaacattctaggtaatgatgattccacttaagaaatcttcttaacttaaaaagacaataaaataattatttagaccggaaaccacactgcactgtgaactgaaccacttgtcatgtatcacagctatacagtattcaaaaagcatgcaaatgtcactataatgtgtatcacagaaatgaccgtccctcctcactggggtgtgacataggtggatcattgagcatccccatgaggggaacctctccagaaggaatgagtccctcccttggtcctactttctgcctcccttttccttcctgccccgtgtgtacctctcctgtcctcttcacttgaaacatgccaatctgcagtgattagccacttcccaagattaggactgagcatctgattgcaaagttttcaagctttctctttgcagttgttcaaagctcatcttgagaattgagttcccccaatcaactctgcatgcagttcatagtctctgcattaatgaggcaggtaggcaaatgctgggcagccccagtgaataacctcagcaagcatggctgctacaaacctcccactgcaatttttgtgggaggactgtatttacctgccctgctttaatggaggtgggggggcgtggttaacaattccaaggctgagtattaccgagaagatcctcttttatatttcagaggctcgttattcttcctattttaatgtcttcctctgtcaaacatacctatagtggtagcatgtacctgttgagttggtggggtttcttatttgacttctttcttcaagtcatagtaggaatgattcttgcttgatattatcagcccttgagtaggaagaaagcagggacaaagaaaatctattctctttcttttttctttgcagctttagatcatttcctctacgtttaattgttctaaactattgctttccatcttccttttcattcttcttgccttttcttccctttcctatctttatttatgcttttgtcttttgttttctgcatttcccttccagtctttctttatcctgtaagcttttcaggaagccagaacagcaactaatcaaataataaggtcatggttagagaaagggcatgggcagacttgggctggacaaaatacattcagtccctatttaagaaatatttatccaggcatggtggctcacacctgtaatcccagcactttgggaggctgaagtgggcagatcacctgaggtcaagagtgtgagaccatcctggccaacatggtgaaatcccgtctctactaaaaatacaaaaattagctgggcatggtgacatgtgcctgtaatcctagctactcaggaggctgaggcaggagaatcacttgaacccaggaggtggaggttgcagtgagccaagatcgtgccactgcactccagcctgggcgacagagcaagactctgtttccaaaaaaataaataaataatagtttactcatagtgactggcctaaaataactagtcagcattagatcaccaataacactcccatttttgcagatgaagaaacaacctcaggaggctgcatttggcaataatacagacaagagtattgagaataaactcggagttccaggttttttctgttgttagacatgtgtcccaattcttcgactgcaaaacattgctatcctaaagttagatgcttgccaataataatggatatccccagcagcatgagagttcagacatcccgaacatttctggtgaaatttttagccagctgttaaaggaaattttgtatgacatctcaacctacaaaaatgttttgcgtacaaacttctattcagatttcctgctcagctagtgtttacatcttcactgtgccataagaggcggtgaaaagaaacaagaaattaaactgccttcctgtttcaggaagctgggcccagacacgtctctatatgtaatggcaagagccttgccctaagaaaacccctattttgcccctgttgagtaattgtgctaggaattatatttaggaccagcctggctgagggcaaaattgtgacattgaagggataatctcctgcttagtcaccaactacttgatttttatttaggaggagaattggggagactgcaactaagagaatgctttcaaacaaagcaagccttactggtttgatggcatctttctgaaaccagagctgtgtagggggagcaagacagacaataaccatgagtatatataccactaagtgggtacactacagtgctgaatttctgtgttcttacagaatttttttcttagagttatcaaaatacagctaaattgctctcactgtgatccacgcctgagaattccctccttgttttgttctttctccctattctttacatctagggaatgtatgttcctcacatgaacagcaaatgaagctactcaatgtaaatgtattttaagtgtttgaaagaaaagtgctttccaaattatcatcccatggccttcacatggctcttacacgaccctaaataagttaccatgtaggatgtccaactaccctgaggccaccatgctgggagagtgcccaagccacatggagaggccactcgtagataatccaatcagtagtcctgactggactcagcattggagtcacacgagcccacccatccagcatatgagtccagaagcctccagaagattccagcagcgagccaacccattccgtcagcctccacgtcttccctactgaagcaccagaaaccacagagcacaaccaagccccttctgccatggcctttccaaattcctgacctacagaatccgtgggcataagaaaacagttattttacaccattaaattctggaatggtttgttataaagcaagaataactggaaccatcaccatcatcaacaagttttgattttctgaaacactaagtaattgtacataacactaggagtaagtacaaacaccattcaaacacaaaatcacgtagatttgtatagagctacacatattctcaagcacgtcaggtctcaggcttcctagagggctgcctgaagagggcagccgacttgggctggagaaaatacattctgataagaggtactgagaacacactatcccctctgcggtattcccatcaaataatccttcagacagtgttttagtctgatcgggctgttctaacaaaataccatgaactgagtagcttataaacaatagaaatttatttctcacagttgcagaggctgggaagtccaggaccaaggaagacttgatgtccggtgagagtgcacttcctggctgatagacgaccatcttcttgctgtcctcacgtggcaggagggcttagggagctcaccagtgtctcttttataacagcactcacctcccaaaggccccacctccaaataccagcccattaaggatcagatttcgacatatgaatttggggggatgtaaacattcagtctataacatttagggtgaacctgtgagaacccagatagcttcgtaaactggagcactgatgcaggttcccagagtcctagagctgcacttgggcaggtgccaagaacaggaaagtttttccttctctatttattcctatatatttattctctgttcattctctgaatgaatatatactattattacatgaaaatatttgaattctttaacgttttctgaaacaaatacaattagttaaaattttcttgaaaattgctttggaaaaatgaatgccttagagtacaactgtggtgtgtctctttatctctaagattacttaaaagtatcacttagactgaacttcactgactttatttcctctttcatgtacctggtggcctggaattaactctgttaaaataataatctaaaataatgcacactgtcaatggctttcaaataacttgggtcagcttgttctttcttttactataaacagccagtagatctaacactggaaaacattaagacaaaaaacagtctgacctattccagcctggtcatggccatctaatttccactccactgtttataatgtatacactattccaacatcttgggtataaagagctgcgtaatatatgagctctattctgctcctagctgcttaccctggtttcatacatctcagaaattacaaaatcaatgagataaagtccaccctagcttccattcccccttctctgctgcatgtttcacttcaagaagccaaaggcatgcctgaacctacagagtgagaccctttgaagattggaaaggaagagtctcttccaacaccttgatatcatagttccctgacctagcgaatggtcctcttcctacccgtgtctggaccctctctgcctcttcagccttatctctccccatcctcccccttgtacctggggttctaaccattctgaatgtgggtgcctgcagttcccacccaggttgagtgttgcctctgggccatcatcactgctcttgcggcagtacccatcttccagccccacctccaccctcagcccttgtgtactggcaggaaataaattaccgcagtgcaattctgacgttaaggtacatctttttgttgcctctccttttttagttttaaaaaaattcaaacttctagaaaagttgaaaaatattataatgaacacccatatagattcactaatggttatcttgctatgtttggctttatctctatttttctatctctctttttttttctccctttggctaatgatttgaagggaagttgggcagagccatcaggccatttcatccctatatgagcaagtagctcctcagaacaaggacatttttatagtaccacttcttgaaggccttcctggcatccttttcctccacataaatgaattccttaccgcttattttaaaatttcctctccacatttttcgcatatacatctttatctcagcacttataacccttgcatggagttgtttataagtctgtaacttcttcatcagctgtaaactcctatgggcagggcttcttttatttttctctggatcattagtgtttggcataatgcctggcatatggtgtgtgtttaactgttagctaaatgaatggctgaatgatgatagccctcccttgctttcccatcccaaaactccaaagcccctgctccccttggccatctgctatggctgccttgacaatccatagagacttcctttattattctccatggctactattcaaaactcttatccttctcttaccctagccttttccatttcactttcaaaagatgaccccaccgatctccttatgcatagatataaattcctctgtcaatctccttctcctccatacctgtatctgccctttccttctcaacactttcagggaaagaaatgttcttcttcctcagctgagccatacttccatctgtgctcgatcacatcccttctcatgtggtctacaacaaaccgccttgaagtctgacctggacttgaagctgaagtctaacgcttagcagctgttaccaacccatcttcttccagacaaagggaattgtattgttctaggaaattgtgaggttttgataacttttgtcaaacaactcctgacatccagtccctgtccttgttcagttccccagagcacatcaagttctttctgtcattcctcgcctgtggacacactgtcctctgcctttcttcttctccaactggagaaattctgtgcatccttcaagaccttgttcaaatggcatactggctgtgaagcatttctggagcatcactccctcctcttggccaccctggcgcaaaatagaattagtcagtcccttctctatgctcccttaacttcccataaatactgttaggaaatattctttgtgttccattgtgaacaccagttgagggtctgtcccacacaccacattatgaatagtaatgtgttcttcatgactgtcttacacacacagatgctaacttcaccgcagagaacatggtaccttatctgagaagtaattagcccttaagaaatttcttaaggaagagggcatgatttcatgatttcattgtgtctgtccttgcctgcttagtgctgtgcctgatcacagaaccaaggtcaggagtcttggctaatgcatagcgggaagcaagcaagacatgggggagaatgcacatggggaaggcattgtcttaatgatttcttcccagcagtgtagactctcaatgaagcttagtaggttttctgttcctgtgatgagcacaagaaaaatcttcaagggattaaagtatttaagggattaagtttgaggaacaaaaggaatttccagtgccttttccccatacaaacacttccacacttataaatcctctcacctccctctttcctgactcctcatttttaaagggctgctattaaattcccaagtccagtgggaattttactagtggatatctggtcttttctactactctgtcaatttctaagcattaggcaatctttttgttgcaagaaatattatgcagtaatgttttgtagggattttggtttccatttaattactttctataagtatatttcctaaaccaagtttatattcttaaggaaaaaaagtgatattgttgagatgatagctttggatttagatattttcgtaatagaatacagaaaaaaattgtgtttttattccattttcaaagaaatcagtggtgggttttttccttctaatttaaacatttccctgcagtgttgataactcaaagcaaatctcattacacatagcacataagaaccagaaaatgatgctgaattgagttagaaaaggaaactgagtagtttcagctagatatgatagttgttctaagattttttaaaatacgtaccattttgtttgtcactatgctgggcaacatagggtttccaagagagctgtcaaaagtgatccagatccttaaaggtatatacaaaatgtggacatattgtaaaatacaaagtgatgcagtctagtgtttgttcctgttggcaagtatataaaaggtgtaggaaagacctacgagaatcaacataatgagaaagcctaagggctaggaggagaaacttaagtaggaaaacaggtaggattcaaattgttagacaaacatcagacaaaggaaaagtgatgatgaccactgggaataaatcagcctggctggagcactggataatggaacgtattcggggactacaaatggaaagcttcagttgataaggaatctggacaatggattcaagtagtcagtgagcaggaaaaaaaaaatcatgttttttaataccacaaaggatggattgaaatgggaaaagtttgaaggcaggaatagcagtttgaaggctatcatgatattttaagtttgaaaacctggtggtggtagcaataaaacggaattgaagagatgtgaaagaagcagcgataaggcttggaaacaagatcaatataagggccagcaagagagaaataatgtgaatggcagggagtagaataggaagtaaggacattctgctttgtggatgtgtgtgggtgaggatgtttgtaaaaataacaaatactactatttattgagcatttacagcatgccaaatagtctgctaataatattacaaacattttatattgtgagcattgtgtaccaaacattgttctaaaaccattacctctatgaactcatggaagactgctaacatccctctatgatattattatcacatataattcttataatatccctttgtgatatatttatctccattttacacatgggggatccaagacacagagatgtaagcgacttgccagaggtctcacgcagagccagtattcaaaaccaggaagcctggcctcagagcctgaactcataccactgtgctttcctgctaagcattttgtgtctgacgttgtcataccactgcaaaacccaaccacagtgagaaatggctttcctgatcatccccattttccctatcggaaacagattcatagaaagtgaggtatttgccggaatatctaatcttctgttgactacagaccacaaaagcttataagagaagaaaaagccgaagttatacataaaagtcaatcacatggtaacttaaactctaaatagtgcaaataggaaggtagggttatatcctcaattttaagaaaaatattatatatgccaatagtattttaattaacttgaaataattatattactggtgtaatttattctgtcaccaggttgtattaaaatttttatcagcaatcttgagtatgtgtattgatgatatcaataaaaacatttggactaggctttcttttcctaattgcattcagcttctctttctggttcaataatggtaattatatagcatcaatatgaaaatttcactcaacttgaggtgttcttttttatttttctagtccaggcaatgtattaataattagcataataattcagtgtaacataatataacctaataatatttaatcatattaataatgtaagtggcaaaacttaaatgatatttggaaatgttcctaaaatttttacaaattggttgggttacccaaaaggcaaggaattttttcaaatgggatttttattgcgagccaacccctatagcttctggtgcctacggcagaaagatccttcatttccctagttgctgtctaaaacacaggaggaccattttcgtgggtttcatcaggtcatgaatgacatatgcccctagcttggtgactcttttctcaccccgagaaaatcccccaaaggccagctatccacttgagccacgtccctacaattactccttgcaaagggaaaaaagaactaaattatttgcaagagtaaaatctgtacccaatcataagaagcctgaggctaaaaatctgttgtacacttttcttctttctgaaataatattaagctcaggcatatataattatacaggaaccaccaggctgtgaaggatgagaaaatataacacaattatctcttcacaaacctcagctgaaatctgacagaatcaacatgagctgaaacactcctccccctcctccttcccttctccaacttaacccctgccttcaaatggctgtctcccagaatccacgtctgggaatgctgcctacatgctgcctatcacagaatgaccgggcaggtccagaaaacattcagtggaagatgtcacattccatccagggataaggtttgcaggggaacctcgttttgatgcagtgggaacactgtaagcttcataatcagctgaaaaacaacccagtctatggggcaagaccagccctgctcaggaacttgcagcaggaaggaaaaggagggagctgtcacgtggggggagaattagcctcagaataactggaagacagattacggagagagaccagggaattaagtttgcaaactagcctgatgcctgcagaagtgccctcctacccccaggatagcttacaggcatatcactgtagaaaggcctctgcaggaggagtaatgctacgcttccattccttaggctatgtcctcaggctgtgccctctgtgcagtgctttctcaagctagtatttctatgtcttgacacctctgcttcttatgtcattgtctcctatctgattcaatctttgcatccattccttttggcgggtttgtctcatgttgtccccggacactctctttctatctctcttcacactgcagcccatgggacagccgtgtctcaacacaaaaccagcactggctcctgggaccccatctcagatcaagtgccccagacccccttgggtctgagcccaattaaaatgaaatagggagaatatgctgttggcaacagaatatttccaaataagaactgagtgtctatttcagaaatcagttttagggtaattttcacatctgaaatgtcaagcctggctttctttcacagaaaggtgagtgtcgaggaaggttggaaggaaagacgtagcttgtgggaaaagcgactgattcctcagacaccattattgtcatcagaagtcactggggccattttaaacccttgtaattcaacctgactaaagcatggtctttgagaaagcttgatccatgtcgaaaacattgtcaataaactattctttgattaagaggataacttgaaatttccacccacagggtcacatttgcctcctttagtgacattctgactgcctctgctttctcttattctatgtgcagccactgtgcttggaagggtgagggttctgcgtatcaccactcaggatcactcattagaccttgccttttaaaccgaaaggctaaattacatcttcagaagcagtgctgtgtagccaaaagcaagcttaggggaaagggctggcagctggaggaggatggcgcttttgtagtctcagaaagaattgtgtacatgaggattaaggtgcagctaattataggagcagactatggaactgacaccattttgcagctgcccctttattgaggattcactgcgcatccgaatcccttccccagcagaagtgggaattcctgttagttgaggggttagccaataattagcacctgccaaattctaggtctcttagaagacctcctggctcagtgatctaagtgaaaacgaatggtgagcctccgcatgagcaaataaaacaggctaagttacataacagcatatcagcaatgtaagccacagaggtgttcgatccaggagtgaccttggtgtcataaagccacacaaaaatgtttctgaggttattggctgtttggcattatcaacactattattttctagttggcatacataatttaggatgatttaactctccaacttcctgattcttttccttggcccttgtgatgggtgaaattgtgtctcccttgaatttgtatgttgaagccctaatccctaggacctcagaatgtgaccatatttggagagagagcctttaaagagataattaagttaaaatgaggcaattagggtgggccctcattcagtcagactggagtcctcgcaagaagaggaaacttggacacacagagagaccagaagggcacacaccgaggaaaggccctgtgaggggcacagcaggaaagtagtcatctgcaagacaaggagagggacctcagggaaaactagcctgctgacaccttgatgtgggacttccagcctccagaactgtaagaaaatacccaatctgtggtattttgctatggtagacttggcacactaatgtactcccctccctaagaggcattgatatcaattagtattgtgtttttctttatataagaaaaaaatcagaataaatgacagcttgcagaaaaccagcatttattttgtatggcaattccatgatcatcagagctcaacttccttctgtctttctgtttcaccatcctggcactggcttctgtggtggttctgggcttatttgccctcagaggcatccctacccctttccctgatgtgccctgtactgcagggaagctggcccctgtagcttgtattgctctggttcttgagattattggcttcctgctgagttttgccagtgggaggcattggccagagtttgatggaatggggaggggggaggggggagaagcctttctgccttgggctgcccctggcagtggctgtgtctatttggggctctggctcctacaggctaggcccactgtgtttcagcttctgttgggtgactctgcagtcggctccagcaagacactctctctcctttgcctacccgcggcattggtagtggctaatctcttgctaatctctaggttttctcaccattttgtttggcttctcagctcttccaggatctgtgtaaccacttcccccctttaaattcaatcaacattaaatgtgaagtatgattttgctttcctggttagaccctgcctgatgcaacttctatactggagatcacctcattatccaagctagctgctaaaactgcacccatcatgtctagttctaggacataggacagaaggagagagaaagtaaagtagaatgaaaaggtcttgcttcttggctaactcagctcctttaagcaatcttttggaaaaatcgcacacatttctgcttatacctcattggtcaacaattagtgccatgactacccctagaagcaaaggaggcaagttttccatataagcaaaagatgggaagttacaatttctgcaattttacgaattctgacattaaattgttcctccagtcaaactgagattaatggctctcacttgcagcaattgaggtaccctgctaatcccaaatagtttactcagcaagaaatagtgtgaacccgagagccaatgcaggctagggtactgttcaagttacctattgctgcaaaacaaaccaccccaacacatagatcttgaaacagatattcattatctctcatggttctgtgggtaggctggactcagagagttctctcctgaatatttcatggggtcatagatggtggttggggcttcagtctacgaaagcagcagtctccaacctttttggcaccaggaaccagttttgaggaagacagttttttcatgtggggtgggtgggtggttccgggatgaaactgttccacctcagatcatcaggcattagattctcataaggagagtacaacctagatcccttggaggcacagttcacaatagggtttgcactcctctaagaatctaatgctgctgttctgacaggaggcagagctcaggtgataatgctcgctcacccaccactcacctcctcctgtgtggccaggttcctaacaggctacagactggtaccagtctgcgacctggaggttggggacccctgttgtaaaggttgagctgagatggatgtccaagaaagcttcacttcttgactaacagtaggtgctggttataggctgggagctcagctggggctgttgattgtattgcctgtatatggcctctccatgtggctagagtttcccatagcactggggctgggttccaagaggcatcccaagagacccagggagaagctgctaagatccctcatgacctagcctttcaattttccagtgtcacttttgccacattctattagtcaagcagattcaaggagagaagaattagcctccatctcttaatggaagagtggcaaaaagcacattacagagaagcatgtggaatgggagacagtgttacaaatatctttgaaaaaggcagtttgccatagttactgcttatcaagagatctgaagtccattcctgtttgaccttggtttagatgctttccctctctgagcgccaggatctcctattgttaaatgatggaattgaatgagatactttttacagtcattcacatttaaaaatttagtgtttggctcattgtgaacaccagtatctgtatctacctagccataggtcttgaaaaccataaagtcatatgaaaggaaaagcttaaattgctagcaattctcatgatgtcgcttttagacagagaatgtaagaaattagatgattaaagacttttcacaaaagcacacccatgtttgaaagttgtagagcagcaaaaaagcattataattcaactaaattaaaaacctcaatagaaaaaaagggagtgtgaaaatgggaagtatcctttctcaacaagaaccaccctgtgaacattaattttctcctgcaaatctcagagcatttgacacattcactagcctaaggttttactattttctttttattggagaggcaccactggcagagagaacataattttatcatagaaaattagagttgaaggggacctcaaggtcatctcatccaatgcagtgactctgggcagaagagtacaaattatatacacccactgagatagtcatctagagattaaattatttccccagcatcaaacaatgagtcagcagctgagctgtggcaaaaaggtaaagttctcgacttttcagccacagacaagcagaagtccccagtcattgagagtcaaaaaatgctttatggtttccaagtgttttcatagcttccctccctcccatccttcctttctttcacaatattttgttatggatatattatatatcagaaaatgctgtccaggttattttgtttgatccttacatcaacactatgatacttctaaatactattctttgcatttcacagctgaggaaaatggaacccattcgagttgagagacttcccaaagggcacatagctagtaagcagcaaagtgccatggatgggagtggcaaagtactgatttcttatcctaaccttttttttttttaagcacattttctattcccctttagccataatatttgttctaatggctaagatttatttagtcctttctatgtgttgggctctgtgtgaggcactttatttataatattttatatgtatgtatttgtgttatttaatatttatatattgtatttgtatcatattttatttgatcttcacatagtgttattgtgcagtgttttgctattttggccccatttccagatggataaactgaggtagagagaggctaaattaagatgttaaaatgggaatgaaagccaggatgtctgactccaaatgtcagctattcataagatattttctgtccttacgaatgctggtcctctgagaaggtgacatttcatacttacatttagactcttcaaaatttgatattaaaatatgtccgatgttatacactgtgtattcatgcacatagaattgattaatatttgctgctgctgcaaataagtgcctagactaacttttatactacagatatgtattttgttttactataaattcagttgacatgagattaaaacattggattgagaatcagaagacccagacctgggactgagctctgccgcttagagctgtttgactgtgagggagttaattgccctctttggtcaattaggcaattgccttatgtataaaataaaaggattggactaagtagtgataattactctgaaatccaacaacatgatatagttttccatacatattttctggctgagaaataaaaaaaagtacttctttggccttggttcttttattcttccaagtggatctcttccattttcaccaggagaaaagaaaatgcctggtttcccaggagcttcactctggcccctcggcagccctggatcccttgtcctgctgatttttagccttgcagagaggcaataccctttttttgtttgtttttgttttgttttgttttttgctttacaatttcactgttccccaaagtgcttcacagtgtgtattttattttttaacttgataaaaattgaaataaatttctccatgggaaattttgcagtgttgagacatctgaaggaaaaataagcacaatgcccatcagtaatgtggctgtaacgttctgcagatatgaaagcatttttgcaatctttggctgtttggtccccatgccaatcctggttttcatagaagggaaaactggagatccagttgctttaggtgatttgcctgagtggccacccagattgtctcatgtctccaagctattaaatgacaaaagtgggcctcaaagcaccacagaatttggatttccatgctaagggttaagggtctgagaatcaccagatattccctttcatagaattgccccacttacctgcatgaggaccccaagaagccccattacaaagtggctcccacataaatctgattagagtgtaaataggcccctgtgctgtccagggtaagattagggaaaccagtttactcttatcaggacaaaatgacaaaaattttcctttgttgcccttttcatcacctgcccgtagcagctcctagcatatcacatgttcataatcttcatattattcttcctactgttttttataattcagaggccctcaccgaaatccatccccatatcccacagcctgtcttcctagatatactttatgcttaactggcttgatacactttcctcaccagatttctcatctttggggtcacttcgtttatgaatcctgctctgagccaaataacaggatggaaacttgattaatgaatttattattatacaagaacataggtactaactggttagcatattgccctttcctggtgatacacatgcattgaaaagactttttacccttacccctcaaaaaatgaggttgatgacacaaatgtggagacatggacacatcagaaaatcaggtcattattgacaacatagagctttgcctattgctcaaatgactcaatctaaacaattactagatggtgtaatacaaaaaatatatgtgtaaaccatatatctgaaaaggggttagtatccaaaatatataaggaacttatacaactcaatagcaaaaaataaataacctgtttttaaaatgggcaaaggacttgaatagacatttcaccaaagaagacatacaaatgaccaacaggtctatagaaagattctcaacatcactaataattggggaaatgctaaccaaaatcacaatgaggtatcacctcacatattaggacagccattatcaaaacaacagaaaataacaagtatttagaggatttagggaaattgaaactcgtctgaactgttgggaatgtaaaatgttgttgccgctatggaaaacagtatagagattcctcaacaaactaaaactagaactactatatgatccaacaatcccacttctgggtatttatgcaaaggaattgaaatcggtatgtcaaagagatatttgcactccaatgtccactgcagcattagtcacaatagccaagatatagaaacactgtaaatgcatatgaaaatatgaatagatggatttatgaatgggcagagaaaatagtatgtacatacattgagatattattcagcctacaaggaaggagatcctgtcatatcctgccatatggatgaaccttgagaagattaagctacgtgaaataagccagtcacagaaggacaaatactgtatgattccatttatctgaggtatctaaagtagccaaacgcatagaagcagaaagtagaatggtggtttccagggactgggaggaggagaaaatggagagttgctgtttaatgagtaaagagtctcagtgatgcaagatgaaaaatttctagagctgtactgtacaacattgtacttagagatagcaatactgtactatacactttaacatgttaagaggatagatctcatgtgctatttagcaaaataaaaaaatagaatgaatgaataaatggataaatgaatgtctgcttcagaccaacctttattagtcaatcactatatgacattggacataataattaacctctccagtcctcaaatagcaatatcttctttacagtggtgatatgaggttgaattgaaatgatgattaattgtaaaacattgtgaaataaaaagtagatgtattgttgttatcgtaaattgtataactgcttctccatctgaagaagagatcatcatggggatatagctgatgttggcaaaatttctcaagtgtaatcagtaataaaaatatttgatcataaaaattactctttaaaaaaaagcttttaggttcaatggtctagttgtttcaaataatattcaatttttataaaagccaagttttagctccataacattaatcttccaaaatgtcactgagtaaggcaggatttaggggatgtatgtaaacccctaaagggtatatttagcccgagatcttttctcaacgagttactatgtgaggagacaatggtgcacagcctgatccaaacagtgccactttttttttttttttgatacggagtgtcactctttcacccatgctggactgcagtggcgctatctcggctcactgcaagctccgcctcccgggttcatgccattctgctgcctcagcctcccgagtagctgggactacaggtgcccgccaccgcgcctggctaattttttgtatttgtagtagagacggggtttcaccatgttagccagggtggtgtcgatctcctgacctcatgatccgcccccctcggcctcccaaaatgctgggattacaggcgtgagccaccgcacacagccaacagtgccacttttgtgtcagttatctttgcaatggtcatatcattctgatgtatatcttcaaatcacaactgaaaatatgtaaagaattggtaacctcagtgaccagcttccctctttattagcccatttacagggcttggtttacccaccctgcacaccaaatcttggatgcttcttttccaggatggctttgccatctaccaaatgagtaaaagaccaattaaactactgcaaatcattcggtaccattgctctaagaatagcacaactctgccaagtaataatattctagttaaactgactactcatttttttgaaatgagttcatttgcccgcagtacgtaaaaccctcctcacaaatgtccactggtagagatgaagatagaaaccctggataccacacaaacaccatttgagagaagagggacagatttccccagcaaaagtgcatgctcatcactgatgctaagcacataagtgctgttgattggttgcctgaatacagtgagcacgttcaggtttaattctcatggctgcattgagactctaaagagcagaccatgagtagaaatgattagtctgtgcacatattttttatattttttatagatttgggggtacatatgaaggtttgctacatagataaattgcataattgtgaggtttgggcttagagtgtacccatcacttgaagagcgaacattatacccaaatggtaatttttcagtcctcacctctcacctacccttcccctcttggagccaccagtgtccattatttcctcggtatgtccatgtgtacccattgcttagctcccacttccatttgagagcatgcagtatttgattttctgtttctgagttatttcatttagaataatggcctccagctccatcagtgttgctgcaaaggacaggatttcattcttttttatgtctgcacatatttttatgtcaagatttccaccgaaaagcgctaatgtccaagttctggagatagaaaagctagtagtttatgaaaaatctcaacatccttaaatttgcatcatattataaactctgtacatggaaaactcagtgcttttatgttttgtatctactgttttaactgaatgtgatatatttggttatatatcttgtctgcatttttttagaaaaaaaatcaaccttgcacattttacttaatttgtattgatatttaccctgttttcacaagcagacatcatatataacacacacaaacgagttatttaagtattactagtattggtatggctttaccagcacatgaatgattcctattccctgggagtccaggcattgaggccatggctgagtgaaatattgactgcacaatgggaagacattgtgtcttcactgagttcaggccttataatgtataactagtgttacctttttctatcaacatacgtttagtgaccctcctcaagtttaatacctagtgatagcaaaatccaacagctgctgaagatagataataaagaggcaggattctttaaaggatggattatgttttgtatcaattgatatggagtcatcttcaagatggcagactcaaaggtcttcacgtctaagcagatttggcagaaagaacagcattataagccccatttgcctctccctgaaagatgctgatggcttcctaaggctacatcaaacactgcctacactaaaatgggtgttcgtgtttgcattatcttcatgtggattatgcagttttatggaatatgccccagtctgcttaatgattacaataataaaaaaaattaacgacaattataaaaaaattaacaacaataatagcacctactaacattcattaagtacttagtacatgcttgatactgtctttaaaactggaaaattatacctatatattaattatatataatcaagatatatatattcttcaagattatatttagttatcgctgtatcagatatcctcattttatcttttaaaaaggttgagataggaactatactcattttacaattcatattaaagcacagagacatgatatagaatgtaagctccataatagcaggaaagtatgagtatttagttcactgttgtgtttcctggagtttataataatgcccagtacataccaggagctcaatgacatttgctgaataaatgaatgaatgaacataggttactctaaggttactatgctagcagttgccctataataatttcaagttaaatacttagaaaattgtaagaacttttaaaatggtaattcccttttttaaaaatgtgtgtgaattggaagatttatcacaattagcatgagtttcaattattcaatctttattaattttgatagaaaaaaatgaaaggtactccattcattcattcatgaactgatttggaaatattcactggctgtattctatacgccaggctcaatgccaaataccagagacctggggaaacttaccgtggaaaccaaggcagggaacataaatgataaagtgaagtaataattatatcacaaaagaggaaggaagagaaggaagaggaggaaagagtggactaaatttcaaccttaaatatagtattgaaaaactcagaacatattctagtcctcttcaaatgtttccaccgaagaatccctaagagcagatgagatcaaacctgtctttccaagcggtctgtttctcttgaagagcccattgtgagcattaagtatctttgaagagtcatattttatcctaaaattcattaaacttttgtgcaataccatccaataggttttcccagaatccctagaaaacagtgcctgaggcaaatgctttcacactgacactttgctgagtagcacaatcccagagaggcaggagggagagagaagggggatgaggcagattaggtggaatgcagatataagggacatcaccaagttagccttccctttctagcaaacagagttgatggcctggtctgctggatgtcttttcaaaggccatgtggagactctgtcattgaaggggtgaggaaggagatgggagggaatttgtgcactgggtccatttcatatttatcaaactttgcccagtgaggagttaacacttctgcattctgggttagggccacatgacccccttcaagacaccacagagcaagccacatcacccatagggcagggacttctttgagtctagaatggtaggagcatcctgagacccctagtgggagtctcaaaccaacacagctatggtagaacatgtgaacaaggatcctggagacaggttgaatcccgggtatctagagctaaccatatgaggaatctaatacaacctgtgagcaagattgaccccagaaacttgtgccatgttcttgttatggctttgtatcgcctctagactcaatacccctgggagaactcaaaaccagagggaaacattgcctgattaaaagatgcatatctgagatttaaaatagggaatggatgtgatttctgacacagagagcccactggagagcaggtgggtgtggatttgcagagaggaatagaaattaaaacattgcagacattcagctactatcaggtggggaaaaaaatgagtagtactctcagctactatccaggtggaaaaaaatggatgatgcattcctgtgcagtggcaacatatattaagaggacttcaagtcatttatttacttatactctacctgttcccagtaagatgtcatattatagaatcatttgcaatggttcacaagtaaaataagaactaagtcatgaattaaggcaaaaagaaaaaaaaaactttaaatatttagatgtctcagaagaattacttaactaagttctaaccctctgaaactttctttaagtgctaccgtgacagtttcagtcctacacgtgaagacttacctatctaaccaacttcaattttgacgaacttcaaaaaatgttcaaaggaaaaatatatatgattacatggtatgaccttctgcaagaaaagccatctcaaagagatttagaaaattctccatcatcgtgcaaatgcacagtacctaagttgctaacattatggataaacaaaagatagcacacaaatttactcttaccaaacttggtgagaccctcaggatagttccagtatcattttctccttcttcctggtcacccaccctctcgggccctccaacactccaatcatgcatatttcttagcacatgatctcatcagcacttcaacatgtgtgtcaaattccttgaatgaacacgcaaaagatagaattatcaaaattgtagatgagttaaaattgtagataacttaagccaggcatgtggctcacacctgtagtcccagcactttgggggactgaggaggaaggatcacttgaggatgggagttcaagaccagtctgggcaacatagcaagaccccatctctataaaaaatgaaaaaatcatctaagagggatggcttgtacctgtagtcctagctactcaggaggctgaggcaggaagatcgcttgagcccaggattttgaggctgtagggagctatgattgtaccactgtatttcagcctaggtgacacagcaagaccctgtatccaaaaaaaaaaaaaaaaagaagtactattaattatgacatacagaattcccaaaaagaacatggaaaacttcgactaaatctagaaatatgaaggttttgtagagataaaatgaaagctcctggactttcttcttgccatgaataattttgagcctctgtgatatgcctgccactgtaccaggcactatggatacagtggtgggcaagacagatgcttccgtgcccttgaagcacttagaatgcaacagggaaggcagatctttaagccagcaaaattaaaatgtgtggccaagtgttatgatagtagaaatagtgttggggtccctaacttatctgggtgatgtcttccatgccccaagaagcaacgtttaggctggaatctaaaaaaaagaaagagagaagatttggaattagctaagtgaagcagagaaatagatattcaaggaggtggaaaacgtagcaaaatcaagatcatgaaaggcccccttaagccatattaaacgattagatcttattataaaagcaacggaagcccactgagcagttcaagcgggaaagtaacatgatcaaatatgagctctagaagtatcaatctggaagcatgtggagaataagcatgttcagaagggatcccggcaacagaggctgacagccagcagcagagagaaaagtagcagagagagatttgtggagtagaagcaaccagatgtggtaagtttttggatttgagatgtgaaggatggggaagacatcgatgatacttatattgagatttctgaccatcattataggatggtactgtttagggagatgaaaatattggaggaacagcagtttaaaaagagaaaataagggctaaaatttaggacatgtagaattttgatagctcatgttcctgtgcgctatccaactacagatgaccaagatacagttgaacataagaacctggagctcacaaatgaggtccaaactaacttaatgaggtacatatttgagaatcaacatatatgtagtaactaaaaccatgggaataaatgagacaagagaattagatataaaatattagaaatgagtttgaatttacactaagttcatagagtccacagtgtgacagtgtgatgatagtatgtgttaacccagaatgtatttggctctaaaataagatagggatagttgtattctccttgaagctgatcaggtcatgctgagcatcatactgactattgggtgccatactagaagcagcttcagaagggagtcctggtgatgagaaggctgaaaaccgagataaaacctaaaaaatattgaataaagcatgaatgttcaatctaaatacaagaaaattcttcaaatattaaaaggacaatcataatagaagctggaataaaattattatgtcttcattcattcaacaattattattgaaggcattgtcatgggagtatttaagcataggctggggaagagctgttaagggttttatagagtatgaaaagatcagataaatgagtaggttaacaaacctttaaggtattttccaaccttgagactctgattcgcattgactagagatgggagggacattgatgaggcaacataatttcagcagactacttggaagaggacttattttcaagttttgagtctaccgtttcataatgtaacctggcaacttcaccaaactgtacttcagtttcttcactgaaagatgagggattgacgaaatctttggtaaggtccctaatgagagtttctacacacattaccaatatatctcagttatgtaaatttttcacaagcatattttggttggatgaaaggactgtttaaaaaatgagggctttcagggaggcaaaggaaatgactcatgggccatcgtgcaagttggcaaagacagtgtaaaccaattttgaatcatggataaacaattttgaatcattacaaatataatggatttaatattcctcaaagatccacccaggaaaaggagggtctgggaggcagtggcagaaatatggatcatacagtaatgcccttcccatacctggaaacagatatgagcttagactttacatggcataatttatcagtaatatctgttcacattcaccatgctcaacaatacactcatattcagattcttaaaatatatccttcttgtttcagtcacccctttgaatttcatttttatatggataactggaatatctctaggtttgataacctgttcagaaaatgctgaaatcctagaagatgctataagaaggcagtcttggacagcatgtaactgaattcagtagtaaaagctgattggctctttcataaataaacacatataaaattacaccaatgagatggcaatatccagataactttgtcatgcttagccaattggctatatcttagaataggaatcctgggcttataaatcagcttctagctcagtgagatgataggaaaaaagaaaataagcagacctctgcattgctttcttcaggtcttgccttggacactgggtaaaatgaggaagggcctctacttccttcagagcctttaacaaagagccccagacaacctaaaggctctaacaaggagagagactggtctttaggaatcctaattttctctggccctgccaccaccttcagatgccctgccaacacactgagagatgaggacttcctgtttcagagcaaagttcttactccattccctccccttcttctgggcatgtctctccgcagaggactgacttccatgacagtctgatgaaatgagcttgccggggcacacagctttttggtatgcataaatgtgctcatcatcatctctttcctattcacagctcctcaggggtttcctggacagcaagagatttgctacgggtggggaaagcagggatttagagcaaaatgtttcctgggcaggccagttctgctgttaaaaaccccctccatggccatccgcctccctttctctatgcaggggagtgtttctgtcacagggacagaggctctggctgctccagcaattacaccttgcgctgcccatctgcagacatggtgtttagcccattgatgaagttataggcagtaggaaacaagttgcatctactgaaaaagtcaaaagcctcaaaacgtaagtgattccctcttagggccttaggtcattgtactcagaggctggctcctaattaaattattctgagatttttcctggtctatttcaggtaaaggaataaagatgggaaaggaatagcatttgacttagtctttaatgatagatggaaaaaaaacgcaaatattaagagatattatagttgtaaaatagacaattagcatccacttcctttcttgatttcagactttgtccactattctccacaaagaactcattttcccaataatgcatttacaaatgaggggtccaaaaattgtctgtttcccttcaaatgtgcacagatgttctcatttgaaaaatgatttcaaaatcatttttttcttgattcctactctaacagaccaaataataacaaagcattaccaccttgtgtcttcagaatctgctaaacaacttctggcactacaaggtagttcccagtgtcaaaaatttatgcagagtccccaacttacacgcaagcttgtgctaaactccctttggtaagctattgttttagtttttagtttttagaaattgaaatagtcttttgtagaaaccgggctattttttaacacttcattttgtagcaattttaaaccttaaaaaggtataaaaatatatatagagtcccatgataccctttgcctaactcaccctcatgttaagattgtatataaccataggataatttagtttcatgtcgccttagtctcctctcatctggaactgttcctcatgaccatcatacttctgagtactggctagttattttttagaatatgccagtttggcgttgtctgtgttgtctcgtgattaaaatgcgtttatgcatttttgcaaaggataccaaagaagcaatattcagcccatctcaaagcatcccatcaagaagtacttgatatcaatgttttaatattgatgatgttcactttgatcacttggttaaagcagagtcttccatgttgctcctctgtaaagttactatttttccctttgaaaccatggtttttcaaagctagagtttcaggatgatacctgaagacctgtgtaacccatgatagtaatcactttgtccctctgggcttgaagggagggcaggaagtcaaatcatgttgtttctcctttggatctacatttactagaggtggtaggcagtataaatactttctccatctttgtcactgtagtcaaagaggagtacagagactcaagggacaattgttagtctcatgatgaaatgagaataatatgggttagattgtccaaggtttgaatcataggtctgcagtgttggacaagtctttaaccttctctttaacaaaatagtgataatagtttctatcttgcatgattgatttgaatattagagattataaatataaggtttccatgtaaggccagaccaatagtaggtacttaattaaaagtattagccgtatcttttgggagatgggatagatgtctctgtcctggtgtaacacaggtcatattcatgaactctttgctagcctagttcattcatttattcaaaaaaaccctatattgagtgcccaccatatgccaggtgctggttttatagtcccagccctcatggaaagtataccttcgtggaagaaaagacagtaaaaaaaaaaaaggaaaatacataaaatgtgaaatgctttataaaagaaaaatgggagagggaacatatttagatggagccgtagaagaaaacttcattcaagaggcaacatttacaatgaaacacaaaggatggcaaaaactgctctatgcaaagagcaagaggaaaagcatttctagcaagaatagtgaagacaaagaccctgacatgggaaaagagcccaggatgtttgagaaaatggaagagagccagagtggccagagcacaatgaataatttaagagctatgggtgtttaatagccaaaactgtttaggaggcttatatgcatatttgttccttagctaatgacatctagacttctgcccagttttaaacatttctgtaagtcattggtggtagaaaggtactttcctcccgactccagcccataccttaattccgcttgtagttaaaagtgttatttattccacagaggtttccttcctctactgtgaacatatcagaatattaaatgtgcacccacttactttctttgctttcctgcatctcccataccagctctgttctgccgacctggtaacaatcttgttaaggtccacttgctgattgcacaatttgctctgcttaaaaaatccctaagcatgctgcaaacatagaatcccttcagcccagagtgaagctgtaaaaacaaggttgtctggtaccttaaatattgtcacgttacattaaaaacatattatacctgattctccaatgctcaaagcaaagcagactcatgtaaacctgctggagaattcttggctggctaaactggctgaagttttcttggggtctgtttgcagacatggctggtggtgtctcctggatgggcttatcacaaatcacaacaggtgccagtgaccttctcttttctagttgtgtagcgatgaccctggggtctcattctagtatctagcagctctgcttcaaaagcatcatatgaaaagttcagaatctgtaatgataggctgaaaagacaatgtttacaaaagactgactttctattaatatgattaggaaaggctctggttttaatgggaaatcttacaaaaaggagtagagagtatccctctcccaccctcaaatattttcagctttagagcagaattagtgttatgaattgaattgtacccctattcctccaaaacttataggctgtagttctaactctcggtacttcagagtgtgaccttatttggagataaggtccctacagaggtaatcaagttaaaatgaggttgttacaatggtccctaatccagtatgactgttgtccatataaaagaaggaaatgtatacacagagacacacacagggaaaggcaatgtgaagagacatagggaggagaccaccatctacaagtccaagggagagccctggaacagactcttccctcaaagctctcagagggaaccaagcttgccaacaccgtgattttggacttctggcccctagaactgtgagacagtaagcttctgtagtttaaaccacccagtcggtggcactttgttacaccagccctagcaaactaatataattgtttataaccttaggtggaaggaacaattagatggctaaatatatgaaagtgaaagggatcacctatcaccctccattcccctatcatactatcactgtgacagtccccaagccctaagacagtgattctcagtcctgcctgcatattattagaatcacctggaaagttttgaaaaatttcaaatgcttggggaccccagatcaattaaactcaaatttctgtgggccagatgccatggttcacatttgtaatcccaacacttcgggagggcaaggagggagaattgcttgaggtcaggagttagagaccaacctgggcaacatagtgagaccgcatctctacaaaaacattaaaaattcagctgggtatggtggctcattcatacctgttgtcccagctacttgggaggctgagttaggaggattgatcacttgagcccaagagttagatattcagtgagccgtgatcgcaccacgacactccagcctggcaacagagcaagatccttactctggaaaaaacaaaaaaatctgagagcagagacaagcacttgattttttcagagctcttcaagagattctaatgtgcagatagatttggaaacccttgcattagtttaaaggagtggtcctcaaagagtagctcccaaactagttgcattagagtcaactgggaacttgttagaaatgcaaaatcttcggccccacaaacagagctattgaaacagaaactcttggggcagagtctaagaatcaatgttttaacaagccctcaaaacaatgctgagaaatgctcacatttgaaaaacattaatctaatgcagcaatactttacatgttagaaggtcaagagaatctgaaaaattatgggaccttcccacacacatacacaaagtatatgtgcaaaaagtctatatttaatatagaaattcattggtctacctcagtcaggtacatgacacctcaatgtctttaagcaccccaatttgagaacttaagactcctcgccttcacctccaacccaccaaaccatacatttagaaaaaaagcttctttcttattacaaaataaacctccaaaggaaaagtctttcttcctgtgcccctcttcaactaattcagggcctgcttgggtgaaacatatgcctcctgcttgtggccatcaatctgcatgctgaggtttacaggcctgtggcttagctgtgtattcattcacctgatacaaatagcaatatttttcctaggctcacatgaatacaaacaacccagctgtgaaaagatcaaggcatgtgtctgttgtgaccagtcaactgcaagttattttttgcagcagggcacggaaagaatatggcagcttttctcaaatcagatcatttttctatgatagtgacaaagatgaaaagtcatggcagggaaggttggtaattaaaatacatctgtgtccaattagagtatgtattacaattattgagttggtagtgatatatgctggtaccaaggagaggatccgaagccctgaacaccataggcatgtgagcagggcattgcgttaggcaaaaattaaagtcaatatggatggagattatttatttattgaacagcaacactgtgcctggcatatgcccccagggcttaagacctaagttacatagacaggcagattgcctagccactaggtggtccatgcttgttggtgggcccacttaatgaagttcctcatctgtgcccaaatgtaaatcaagattctgtggactcaagctgatttataatattaatgccaaaactgaattctcgtttttcaaaggcagaaaagaaaaaagataatgtgcccctgttcacctttaagaatcttgctagaatagccgtgcaaattaatattcttttcagtgaagctctgtattgtttcctaataggttatagggacagtttgagcatcttccttcctttgcaaggtgccagtaatcatctcagccaacaccagctggaagagatttggtgctcctggcttagctttgttaatctgaattatggaagccctgataacctctacataggaaagagggaaatgttacacacacacacgcatagacacacacacgaacacatgcacacacacacaacacacacaaatttatgggctaggtcttgttaaatgaagttcttaattcatattatcatctgatgtctgccctttgactatcaaaatttccaaagaaatagaagcataatatttgttatctaacaaaatacaaaatgtattttagtccccaaaactagtataggaagggaaaatgaagagtcacatgactgaaagtacaattggtgtgacatttgaatgcctggatgtgacagcaagttgatttatattggattttatatattctggagcatgtaatgagttattgatttgtgataaaccaagctgacatttttgtaaccagtaaagcatcagtatatccactaagcatgggtttcactaatgtattgttataacctggtcattggtagttttagtacacatttaaaacatttaaaacagtttttgcaagaaggaacataaacatatttaccgatgtgcatgtatgtttatgccgtttaattctctcctttatctactaggaaatctattatttccttagcacaaacaaaggtcttctcttcactcacccttaacgcgcttccttgacctaagttgatgatggattaccacggtgatctgaactccacttttccaagattttgttagggactgaaaaactcgttttcaattcaaaatttcattagatgactcagtcttcaaatccacccatttatagtatctactccaagtatagttggacattcagcattctctacctctccccacaagccaaagttgtctcacattgcaattctgtaagtctcctgagcaatggggtttcttgctaagttcacgcagaacaagggacatccaggagtgtctttcagtctgaacaacacactttagacattgtcttcagggactgcaagtctcagcagttatttttagaaataggggctgtggggaaggagagagagggcccctccatggtggtatctccacttggcaaaagcccctagtgacttgtcttgctgccaaagatgaaaagaaaggatgcagggagtggtaaggacctgacatctgctgtgcagcttcttggcagccaagtactgtgacaggcccttcacccaaatcctgccatggggacaggggcgtggggattgttacttcaattttgtaggtgagaaactgaggctccaagaattcagtcctttcccctaaatcacacaggcagtgacacagctgagcatttggaattctgcattagggactggctgcacagttcatagatgtaggtacaatactggtgatagtaatatctgtctcatagatttgaagttatgtctcatagttatgaagattaacatttataaatatctaactgaatatttgacacaataaggacttaatacatgggaactgctattattgtcatcattcttgcggttgttgtcatcttcattataatcatcatcatcttttaagtcctacctaggcctctactgcaatgggatcagatggttggcacttcataggggtccaataaatttttacgaaattgttgaataagggaaaaaatgtatttactgctcttctcaacttccttcttggcaccagattttaaagaacttagtagaacaagtcagctgcatttcccttcagtaggaagggcaagggcaatgcacatctgtcaacttgcaggaaacaagggagcaggatggagggccctgaatgtctctcttcactgccagaacagagaactgcaggaaggacatgtctgttcacaggtgttcatatcttgataggaattctggcgtttaataattatcgtgctctcccaaacagcaagccctgccttgatttcctctctgaactcccacaagaacttctcaggacactggaagtatccacaataatggtttgttgccctagtttacctcttgcctcatctcctctcccactaagaaaggctgtagcaattttgcctattggttgaatattgactagtacttattgaattccaagattcatcctatttttacttctaaattccaattatttttaggtaataatttaataaactggatttgttagaaatcaaactccaaaacccttttagcccattgtttgatatttttaattgtcctttaatctctttcaaaatctctccttctgtatagggaaggtctgatgaatttgaaattaattctaattaatctaattccatcactgattaaagctttctgatgtttccatctcaacctgcgcccccacttccccccgccttaggcgaagggcttatagcatcctcagcacgtacaccaccatctcatgtctgacacagttcttttgaagatcagtaacatttgttggaaaatactgagagccatgaaacttagattccattccaacccaatgcttccctaacttgctaaggccaaaagattgccaactgctctgggtcgcagttttcccattagtaaaatagaagacttggccataggtgatcttttagaatccattcaatttttttattctatcagaagtcacctaatgtttaacatatgcttgtaggataattcactttttcatttctcctcaaaatggttatttcccattattaaaatatgagtttagggagatccctttgagattacatattttttcattatccaaaaataacacttaaatatttctcatggtgaagtgaggaatggtcaataaacaatgaaatgcaagctgttatagatgttctgccactctatggaagtaagtaaccaataaaagagatgagaaaaaaagggccagtatcagcttaggtattatttaacagacaaaatgatcaaattttccaatggcaagagcaaaattttataaatgctttttgctgctactgcaaaacctctggcaataaaaataaaactctcttaagacttcttcaaggcatggcttccaggctactaaaatcttcctaccagggaaatcttctcaagagggaaatgaaaaatgtgttgatataggtgggacctaaaaatgtgaatctaataaatgaagaaacatttataaacttgattattcccttcctgcctagaaatcacctgttactttttcccttcttccatcttttcctctgatatagctaattcacatatataaagtagaaatacatggcacacaggtatctagtctgtcttgctaaacccagggcaggcataactaattaatgataatcctcttttcctatgagttctgctgcagccacagcatctttgtcaatgcaacattccatgcagtcactatcagagttgccacaatatactatacttactacttacttgcctcccatgaactagagacaaactagatccctagacagtatgattttccagccgctgtcataacctaccaccaccattccaaggcgtagctataacattctccattgtatgattcaataaacttaaatttaaaatggctgtgagagcagaggcaggcaaagagaagtgactgattttaaaagaaggagaatatgaaagaagaataatccctaagttgctttttatattaattatctatactctttattgagcacctactctatacccagtctagtaaggacaagaagggtgagcctatgccagctttttaaaggcctttattttacttctccttttattcaacactattcagtgggaacctatattttacctcaaattaaccttcacacaatcataggatttaggtcaaagagcaagacaactaatttattacaagcctactgtgtgccaagcactgtgcaaagtactttgcccttgctattttgtcttttacaatcctatgaagattgatattatccctgttttatacatgaggaaattaaaactcatcaaattaaagtgacttttctgaggtcaaacagctgttaaggagtgaagtttggctttacttgtctctatgcagtgcattttcaccacatcaaatcacctctgaaaaagaccttagacatttgttgttctgtttaattaacagatcggcaaagcaaatactgaaaacataagctaccagcaacagacagaggatagtggctgtctctccatgttgtgcctaggcatatacctaaactgccctcctgcatttcacatcaattccattgcaaaggaaggggaatatttgtgggagaaaagaaaacaaaagaaaagcaagcaaattcaagacatttcactttccccatgaagaccaagacaagacaaggatgtcacttctcgctactgctttttgacacatactggaaatattagctaatgcaataaaaacaataatatgaaataaaaccgcctttgcagatgacatgatcatttatgcagaaaatctgaaagaattgatgaaaaaacacctcctagaactaataagcaattataacaaggttgcaggatgcaaggttaatatgcaaaagtcaattgccttcctatatatcagcaataagaaagtggaatttgaaatttaaaacacagtacaatttacattagcatcccacaaaatgaaatacttagatataaatatgtacaacataggtacaagatttatttgaggaaaactacacaactttattgaaataaatcaaaaaggaactaaataaatgaaaggatattcaatgttcatggataggaagacaatatagttaagatgtcagttcttgccaaattgatctatagtttcaatgcaatcccaatcaaaatcctaccaagctattttgtaaacatcaacaaactgattcttgggaggccaaggtgggaggatcacttgaggccaggagtttgagaccagcctaggcaatgtagggagaccttgtctctacaaaatattttttaaaaaacaaaaatttgccacgcatgatggcacacacctgtagtcctagttactcagaaggttgaggtgggaggactgcttgagcctagaagttaaaggttacagtgacctatgatgaagccactgcactccagcctgggtgacaaagcaagatcctttctctagtgaataaataaataataagtaaataaataatttttaaaaattgatttcaaagtttatattgaaaggcaaaagactcagaatagcctattgaaggagaaagtatagactaggtgcagtggcatgcacctgtagtccttggtatttgggaggctgagacaggagaatcgcttgagcccaggggttcgaggccagcctgggcaacatagcaagttcatatatcattttttaaagtatagtattggcaaaagaacagacaaataggtcaatggaatggaatggagagcccagatatttgacaaagaagcaaatgtaatacaatggagaagagacagctatttcaacaaattttactgtaacaactggatacacacttggaaaaaaacattaatctagacagagaccttatacctttcacaaaaagtcacagacctaaatgtaaaactataaaatttctattagataatataggaaaaattctagatgaccttgggtttggcagtgacattttagatacagcaccaaaggcacagtctatgaaagaaggaagtggtaagctggaattcattaaaatcaaaaatgtttgctctgtgaacagcacagtcaagggaatgaaaagataaaccaaggattgggaaaatatattcccaaatgacatgtctgataaaggactgttgtccaaaatatataaagaacacttaaaactcaataataagaaaacaaacaacccaattaaaaaataggccaaatatttcatctgtatgtgaaatctaaaaatgttgaactcatagaagtagagagtagaatggtggttaccaggagctgaggggagggggattggggagatgttggccaaaggatacaaaatttcagttagataggaggaatacgttcactatatttattgtacaacatggtgactatagttaataacaatgaattctattcttgcaaattgctaaaaaagtggattttaagttttctcaccaccaaaaaatggtaattacatgagataacccatatattagtaagctcaatttaaccatctgcaatgtatacagactttaaaacatgttgtacagaataaatatgcacaatttgtattcatccacttataaataaagttaaaattaaaaagacttttgttccagaaagaaggtgaaagtagaaatatgtaatgtagcatagcgaaaatttcctcatatggtattagagaagctgctttagtgatgatatatccccttccatggctaatggtatgaaatgcaggaagccttgctctggcatcccccacctggttcttcaggcacagtactgcttttaacaatgaagtttgagggaaacctagggaagctgtaccctctcacccatccttattgtgagcacatcctctgaactgttagtttgctggttctatagtagacagaaaaagtggcccactgcggtcaaaactagtcaaaagtgtttcctatactcgacatttttcttcttctttttggccaaatttttattcagaaatttatgttagctttaatttttcttgcttatagaaacacattttcccaatgatttttacctacagccagacactgatggtcatacttggctgatggatgcctgtgacacagcattaatgtctcttccccattccttgcccctcagaaaaatgggccaaaaccttcagaaacacctcaccaaagaagatatacagatagcaaataaacatatgaaaagatgctctacatcatatgtcatcaaagaaatgcaaattaagcagcaggatactgccacacacctattagaatgaccaaaattcagaacactgacaacaagaaatgctggaaaggacgtgaagcaacaggaactttcatgcattgctgatgggaatgcaaaatggtacagccactttggaaaacagtttgttgttttcttacaaaactaaacatatgcttaccatacaatccaacaatcgcacattttagtatttacccagaggagctgaaaacttatgtccacgcaaaaacttgtatatggatatttatacagctttgcttataatggccaaaacctggaagcaaccagaatgtccttcagtaggtgaatggataaactataatacattcggaccatggaatattattcaatattagaatgaaatgagctatcaatctatgaaaagacatgtgaggaaattaaatatatattattaagtgaaagaagccaatataaacaggctatgtactgtatgattccaaatatgacattctggaaaaggcaaaaccagggacacagtgaaaagatcaggggttgagaggggaaaaaaggagggatgagtaatcagaacatagaagatttttttaaggcagtggaactgctctgtataataccataatagtggatacgtgtcattatgcattcatccaaactcctagaatgtacagcacaaatagtgaactgtaatgtaaatgcagtgtgtaggtgtttatacaaaaaaacagatggaaagattttgtacatagctctatgtgaaaatgtatttatttattaagagcaaaaatatgcttatttcaaatttccacgtacgactttttcaaaaagacacgatccactgaaataaccctccaaaagaatttctataatctatagcaggtgtacatgttgttaatcaagtgcttaatgttactcgagctagcccattaattttagatcactgcaatatatggcatgggtgaaattatatttttataggctatacattcattttattgtactttggggccttttgtaaaatcaataaaaacattttcatgctttttttctaagacatgaaatacaagtttgctatttaaatataaaggtgcacatttgcatagttaaatttatgacataggctctaactgtgatttatgccacagtatcaataataacatatttttgtgcaatatgcaaactttcacgtgcatcactattcctgtggaaaaaaaaatgaaaggaacccactacgtagcaacccaatttgtgacaatttccagaaactcctgcagagaaaaatgatgactgtgaaaaacagttcctgttctttgaatttgcatttacataaaggaaagtagaaaattaatattattatatagataattctggcaaaagaaaccacaaaaaaccctgcaatatccaaatcaataatggaaataaaaagtatggttaggtccaatactaaacaatggcctagttctctctctttttcagggcaaggggagatagggaggtttaactctgtgtgtatttaccatctgatgttggaatattttgaaaagttttacaaggcttcagattttcttaataaagattaagttgtctgctaataaaattaatcactcttaatgaaggcaaaaccttttcacagtacatgggggtgtgtaaaagaaagaaaattatctgttgcaaaaacccagggatttttgatattttgatatatagctttacagagacacacatacatatgcgctcatatatgcagtcctcattttgcttttgtttttcaaaaatggaagcacatgaaataagctcttctatggcttatttttatctgtcagtatatagtggatatctttctttcttttttaaaatttttgtagagataaggtcttagtaagttgcccaggctggcctcaaactcttgaactcaagcaatgctccctcctcagcctcccaaagtactgggattacagtcatgagccaccatgcccagcctacagtggatgtctttctatgcattaagtgttaatatataccatcactttatatttttaaaatattttgtatagttttaatgtataccatcactttaaatagtgagtttttgctgccaatctcagaatatacatgataattcatattttgaggccaggaacagcagctcacgcctgtaatcccagcactttgggaggccaaaatgggcagatcacttgagcccaggagttcaagaccagcctgggcaacatggccaaaccccatctctacaaaaaattagctggatgtggtggcatgtgcctgtagtcccagctacccaggaggctcatgtgggaggactgattgagcccaggagctcaatgctgcagtgagccatggagccatgatcatgccactgcactccagcctgggcaacagagccagaccctgtctcaaaaaaaaaatcttgtcttactgcattgattaacaccttcaaaataacggtaaataacagtagcaattgatgattgatatccatggctcttattttcttttaaaaaaaggattcttgtattttaccagtaagaactgttggattttgaaatgagaggtttacattttgaacatagcaaaaaattatcctattctagttttgtataagagctataatcaagttgtacttaaagttttttttaaaaaaggttctataatagtaaaaatacattcacttttctggtaagcatctttgtgttaccactcaagccatccattcaataaatatatatttagctaaacattgtcctaagcactcgggataaatataaggcccacactttctagcacagttgaaggcaattacttttactctgaagcacctatgggacacagcccaacagtggggcaggagagcaatggtactaaatggagagagggggacactaactagaggggcttattgtaatggagaagggaggcagatcaaagcacccccaagtgattctgatatggccacccaattgggcactggactttggtaatatctaactttaatttagggttttacggttttactttataaaacttacacgatgtttttaccaacatcatttactttacccctaacaataaacttcacgttaaacattatctcaacattactgaagaggaaactgaaagttggaattgtttagaggtcaaagctaagccgaaaatcaaaacttgtgccctttgtacttacccttgtaaaataattgaataaatgtaatacatgacttaataattttcataatttttggcagtgggatctagaattcattcttccctgattttttacccaatctctctcatttcctccttcaagcagagaatcacctcttaatcacaacaggcctttccaaccagtgttttttcccaattcttctgaagtacaggaatacctaagaccagttccccaggaaattcctgggttcttgacgcacattgacttacgctatcaagaggtaagagagaaagtgcagggccaaagtctgtgctgcactacgaagcattttggctttctatcaagctctcaaggcttaaggccattaccagggaaccaacaccttcagtggatagccacactcctatggcttccaatcaagggcagcctgcttcttctccagaatgaagactgcttcagtcccagagcccttgtcctaatctacctcagttacggggcacatgtgaaagactgtttgggcaaaggatgttgtatttttctgcctctttgcaacttaaggaatatgagaggaagaaaagtggtagagggaactcaggaggccagatcagaaattcagtctctgctgaaaactgccccagatctcactgctaaagtgggatcttgagagctctctggcatattaaatattcatcaaaagtcaaacactattttttcaacatttgactgaataaaagtataaatttgtcccatctctactcttggattgctgttatacatagcactaaattacagttttaatgaagtcagtttaaaagatgaggaaaaaatcctttgtagtttattcctgcatttcattttctcttaatttaatcataaactaaagagattcataaatgtttatggagggtaataaagtgatatttttaatacaaaggttgcttatgtaattaagcatacattctatgacattctatgtaagttgaaatggtttgcatgaaattgacaaatacttatatctgttttatttctctctgcattaatgacaaatcataaaacaaaaagaaaagaaaagtaagttcctggcaatgtaagtacctacagttcgcaaattgaaactgcagatgctgctaaagactgtatctttttcttggaaatgttccattaaatttaattagatttctcatttgctttccttttcactctgtctctggacctctctctctctctttctctctatttttctctctctctctctcctctagatattaggagaacactatataagttgttttaaaatggcccacataatatgaatgaaggaacaaatcaccataagaaaaaaaagtgcccattttgtaatcctataactattacatgataaattgtcctgaacgtactgctacctcaaagcaccctgaccattaactaataccgtgatgctcacgatatccatactcactcttcataagctttcctttttgaaataaaatggaaaactctgcttaaagaattaaaattatatcctatacatttcaggggtttttttgtaaagagaattggaagtgatctaatcttttattgttatagcattttatcatctggctgtcaagaggtgattctttttcctctgaaatgatccactctcttttatgtttcatgttagcatttcaaatcaagtaaaatgacatgttcatgatgtccaagaaaattgagaggagctactgaattgtgtttccctaagttcatttacactttagcagcaaatcttgatgatcagagcctaaggatgcctaagtttacatggagtggtaatggttaagtaaattgatttgggtaatttttcaacctcatctacaccacactaagaccaaagttctctaaaaatttctgaaataatgatttttatatagtttcattaaaagttttaaaagtatctatcagcattttctgtaaaagtgtcaggctgaaaagataccactaaacagtcagctcaaaaaagatagtagataaaatatgatgaattgccacgtctgcatttcctatgtttgcaagccaccagtaagactgcatgatttccaagttggaggacagagtctaggaatgtgaaggatgaagggtttcttgtgcacgttctcttgagcacgtacgccttcagaaggtagataggctaacctgcatcactggataaaaactggatttcctcttactttttcatgtgtatgtggctcatgtagattttggtatttttctggaaaatatgttcccgctgtctactgaagtaactgtgtaataatttccaattttctgctgggcatcacctcatggacaccatgccaaccctttaaactccatttacccaaaaccatactcaattatccccccattaaccttttccacctcatgtttcttttatcaaaattcaacttttcttaaatttggccagactaagaaacttggaaaaatctcccacatccccttccctgacactcaaacatctaccaactctgctgtgtcttctggtgtatgtttccacttttctatagattctacctccattaaagtcatcttctgtcctgacccctacattagcattcttacgtctgaaacctcttgcttctccaagctgtatatcctccggcttgagacagcttgagagctgtctctcactcaaaagcattacaatcatcttttcctaaaaaaatctgtcttctaaacacatgaggaaaacattcaaactctagcacatgccaattaaggaacttggtacaatgatctcatcctgtctcttccgtcacatttcctgttacttgcctccaagaacactaatcgtggccccagtataccatgccctatcaccctcccctgattctgctgccctctctgcccaaagtacctctgttagagtttctacctgtagacatttatcttccagtgtgactcagcttataggccccacatcatgaagcttttacaacctgcagtattatgcatttccccttgtcctatacatccaaagtacattttctctacctctggatttagtatttacagtattctgctacatgtgatgttaactctttgtacatctgtctcttcagtcaggttgcgtgctctctcacttattattccatccatcaaaagtctcctaggttcatatctcagcctctaattctagacagtaaggataccaagacctagttccctctctcagggagctctgtctagtaagtaataaaacatgttaataaagttacatggtgagataactgtaataaggaagtccaaagggcagagaatagggagacagtgtgataagcaccagacttagattcagaagacccaagttcaaggtctggctctgctatgtaactgggttatctttatagtaagcaaatttcccagttgcagctttctcatttgcaaaaggagcacccctaccacatagtgctctataagaaccaaaataaaattaaatagtaaatttccatttgtgccaccagatctactcttaatccttttttccctactccctagaggttgaccattaagggctgcatcagtgggccttcttgccctttgtcttcaagtgaggttgaaccaatgaagagcacctgcaggggatcagaaagagggaagagagtgggtggtgatatgtatttccccatccccttcctacatgtcaccctaggatgagagagtcccttgactgaaggacacagctgctgcaagtgggtcctctctacagtcttcatatctccaggttctgctggagcaattacctcccccatctggctccttaggacctagaggtagtaaaggccccagagtaactggcccctgtggtctccctgtactctacccacaccttaataaacagtccctttattaaaggctccttaaattaccaaagtcaggtttgccatctgttccctgccacgactctaaatgataaaactgcttttgaaattttaagttgctgtctaaatgcaaggtatttctcgtttatctctgtgtagcactttacacaaagcagattgctgctattaataataaatggtgaaatgaatatatgcaagaatgaatgagtgaatgatcctgcccccttccactttagttacagtcttatgctggggatatatccttgtcaccttgattagattttgtaatgccctgatttgatttgggaggtccccttttcccttggaactcaccgtctcttagagtatctgcagaaatgtcagcccttgtatatttctagtggtttaacttgaaagggccaactttgtttccaatttctagaattatcccccttctctaggctgcacatttacttgataccaaaaataggttacttatttgtttattcatattttttcttcttcaacataaaaactggcaaaaaaaaaaaaaagtcaaaagcaagcaaattgattgttcctttattacatgggaaccaagatcatatttaaggagtcagcagcccagactggggtagttttctcaaagcacaataaataaacatgaggcaaataagttcctctactgcccccttttacaagcaaaagcctagccaatgactgggcaattggatagcctaaccaaaagatctaaacaaaataaatcacagaatccagtagcttgatatttatgaggaactgaaatagaggctgatggattagctttttatattaaattaatttatttccatcaattataaattatccttgtctcctgaatgctcacctatctcaatgatataagagacaagcatttcttcttattttaatatgacagttactgaggttgatggcttacaaatgagaaaccgacccctggaaactgtcttcagaaaacaaatttttgagttaacatatttaatagtatgccttgaaactgagtgggtattattcattagcaaataattgcataactggaattcttaattaaaatttgtgacgagaaatgaatctgtttattttataattatgacccagaaattcagaacatattgtggtagtttatgaacataattccaaagattttattatagcaaaagaattcataacgccttaaacagaaactcttggaggaaaaatacacacgcacacacacaaacacacacacagtgtgtgcaatgatatagtggcaataagatttgaaaagccagccatcgaatacaactataaccaaaatattcaaatttaatgggtgcgtgatattgttaaaaacctctaaccagtccttctggacctttttggattttccagaaaagctctcagccaaagaggttttcattttagctgtgtaagtgaatctcaaaggcagacgacggcaaattctgtgaggctcctgttttaagctttccttaaaaatatcaatttgaagtgattttttcagcatatatcacaattcaagcttctagaagacagccaccaaggaacataccctagcaattgtcaaatgaatcagataatgtttaaatctaacttggttgctggggccaacctactgataagaaagtttgttgtaaaaatgtataggcgtggccgggcgcggtggctcacgcctgtaatcccagcactttgggaggccgaggcgggcggatcacgaggtcaggagatcgagaccatcccggctaaaacggtgaaaccccgtctctactaaaaatacaaaaaaattagccgggcgtagtggcgggcgcctgtagtcccagctacttgggaggctgaggcaggagaatggcgtgaacccgggaggcggagcttgcagtgagccgagatcccgccactgcactccagcctgggcgacagagcgagactccgtctcaaaaaaaaaaaaaaaaaaaaaatgtataggcgtgaattatttttactcgctgactggcaattgattaggttcgaaggccagaggggtttgggaaccagaacttgagcagtacacttcgtggaaccaaacaaaagttaaacaaactaagtttctcttgagcctccttctaggacataaatgaaccccccgtaactgggactggtggagggagcacttcttgccacttcaccacagcttaagagggcattttggactttagacaacccctattattaaagccatactctaacagtgtttgcttttgatttttatcccagaacatcagctgcttcctgtcccccaaacatacaccacccttcactcccttgcatattagcagtgtaattttaataacttcaatatattcaatgttaataaaatgtccataatagtaaacatcctatctgagaaggcaaacaggaaagaaaagattgttttcatttttagtgcctcttatttggaaagatggaaattacccagaattctattctcttttccttaaccagtaggtggcactagtggtttctggcaatgaatcagctccctgtacctataatgtaggggtttttgggtgtaaaacaatcaatgcttaagatttgggggaagatgaggagcatgtgaacatatgggcctaaacagtaattgaaacatttatagcttaaccaaagaggtttattttaatataaatctgcatggtgtgaaataggtcttattattctttacaagtgattcagagcagttatatgaataatagaatgtatataatatacagaggtttaaactatgctatgaatcctattgcagatgtccttacactggattttatgtgacaagcaaaaattattaaaaattttgacattgaagcacacatttacttgtagtttagctttgaatatctaattgtgggtttttacatttatttcctgtgttatccaagacatagtttttaaaacttgtgcttatatcatttttcatagaatggtatactagaaaaaaaataaggattgaggggcaaacaaaccgggattagaatctaggctaccacctactaggacagaaaaccctaataagatagttattttaaccaagcctaggtttctttgttcataaaatgatgtctgtctcaaagagctgtggtgagaattaatactattgtatctggccaggatctgggatgaaacaggtatccagtcagttccttctccctttgtcagtttgaattttgaggttggcagaagcaaataataataatattaggtggggaggtttgtttttaaaaaccaagttttaagtatatatttttagaagtaaataaacttttaatttctaccacttttaattagtttcattatctttctccttggttaagacagtctaacatttaataggtattattcagctccaattcttcaaggtcagaggcttggttactgtaaatttgtagagagaagtctgtcaggaatttggagtctcagctttctttttgttgggatataagctggcattccagtatcctaagtattccttttcaaagtacagataagcacaatttagtgactgactgagttgccagctttttgtatgacccacccttcaaaaagttcgttttgcttctgtttgttcaaatatctttgataaaatgatagtcttcatatctcttgtctgtttgcaaaagagctagtgttattaaaggctgtttgctgttcatctttcttatggaaaaacaatatttttttaaagccttattcttatttcgcttgggcactcagtgtccttccacacagtgacacctacagagtcattagcaaaattagataagtaactgatttattagttccataaatgcatggtgtattccctttcctcagagtgtagagcaaaaattattcatgctgaggtagaataatcaaaatgactttaaaaagcacatttttatcattctaaacataagcactgctgtggtggtatactatcatactacataataatagaaatgaattatgtcagtaaaatcttgaggcttaagatttactgtgataaatatttttcattaaagtgaaatatcttggcagagtcactttcatatgcagactgttgacacaaggaggccagctgtgcctatgcagatgccgagatttgggtctatattattaatgatttatcatgtcatggagagcttagattagttttgaaagcaatcccttgccacaaaagcactttctataatgtgcgaacgcaaggaatactatatgtgcattccaaatcaaagtaatcacagaagctgcagcaacctttgaaatttcaatacctctttttattttgaaacatgaaattctacgtcctaaattttattattcattaaaattcatacaaaatgttatttcatatcaactggatagtgagtggtgtgtgtatcagaattaatagacatatacacatagataagaaaatgaaggagatggaatggaacaaacatttattgcaaacctattgtgtagcatggacttttgcccttaatctcacatttaatgtgaggttggattaagtttcaaattcaattctgcaggattcccagattctgctgcctttggagaatctataaaagcattgtttaatatttattcagtgcttgctttgttccaggtcagatgctaaacactttacatgcattaccacattctgtttttataaaatcaatttgaatattattatcatcatccctgttttccagatgagaagactgaagcatgtgtggctaaataaattatcccaagtcacaagtctagtgagaggaggagcctgggtttcaatccagactaatattccaaagacttcattatcatctattgctattaactatgacctcactattattaactactattacaactaagtaaggggtagaattcaactcctacttgcttactactctgtgacattaggcaattcacttaaactctctaagcttcagttttctcatctataaaaatgataataataataatagtacttaccttgtagcattgttgcaagttaatatttgtaaaatgcttagaacagagtttgggtgcatattaagtactgatgttttgtttaataacagttaagaagttgtactttctgatgactgatgaacttttattaacaattacacacacagattttctgtaattttcagatgaccgttatgcttcaaactggactgtaaacaaaatgactactttccactgatgggaaatgtatgtagataatgtttaagcataatcactaaccatgtaaagcattgagccctttacaatttcttctggtgaaaacactcaattatctccattcatccataccttccttcttttactcatttaacaaacattctcatgccagtactttgctgagtcctggggacgcaggatgaataaatggagaaggatccaatctagagctgactgtattctctggtttagcacataagggagtgtgagaaagtcgtaggttccattgttagatctgtttaacaagtatttattgggcgtccattaaatgccaggcactgtggtgggcactgggactgtctaggtaaatagagattgctgctgttaaggagtgtcgagtggggaagacatgctaaatcggtaatttgccttcaatttacttaattacgtaagtgaactggttaggggagcacagaagaaaagcacttatgcccatggtaggggctagtgggatgaggcaagttttgacatttaaacaaattgttggctagaagtcaggaaaagcagaaattaaactacataccaatatggggatggagtacccagaaagcagagacaccatgaaacagtgtggcacagtggtgaaccgcaagtttctgggtaatgctagcatctaaagcataaggtagggagaggggggagttagactggagaagtagcaaagttaaaaggttaaaagtgtgtaaaatcaactgatgagaccaaatgctaataaaccacaacaatggtagctgcataaagagttagcagttttccttagacttctttccactaaaatccaaataaaaggagcgttgttttcctatcaagattcttggaaccagggaaatgataaatgcttaaaagtaatattttggtcttgaccaaaaggtaaaggataccattcgtaccatgccacagtgaagagcctacttcctacctctcatccccagcaagccaaatatagggatcgactccgaagtcttcactgataatgtagactgaaaacacggctaatccatggcttgaaacgacctaccagcatatccttctgcaatctaaaagtttattttttcctggatttaggaactcagtctagggcaaattgcactcttcaggtggcactctggaaagctgacgattgtggaattttagcaaggaatttaggaatctccagaatttaattttttttccctctttgctgctactgcagatgcaggacaactcaagagctttctgtctccaggtgggtggcgatttgactcctcatcaagccaatggccacccccttgcaatctttatgcaatgcacagtatcctctgcctgcaacgggggcttgctcccttgatggagaaaatacagaataactggacgccaggaaacaggcacagctttctgggtcagaagttggctggggaagggccctgactgccaagtaacttgcaatgatgtcagagcccagcacaaccagaaaacaccaactagccggccaacaaaagacctaataacaacaggaaaaaaatcacagagctgtgttgccaaagctgttctttccgccccctactcttttcttctaattggaagaacagcaggaaagagtctatattttaaaagactcctcatccttctctccccttctttccttgggttacacagtgttaactagggaggaaatagttctccggatgagtcctgcagcagttgcttggggtgtcttttttgagttccttttcaaggctgtccttggaagtttcagaaacaacgaggaccagggtatttttcctaaatgtaaacatgtaactgtgtttgggagaaagcaggaaccattgaggaaaggaagtcctttctgcgcccctctcttctctctttcacggtaattaaccatactcaaatgaaaattaagtttggcggaaaaagctctcttctttttctttaaacaggggcatcatggttcattctagccatttagagccctcagtgatccataattcaactggaaattaataaaacacagcccgttcttggaaatgaagtttgaattaaaatcctcttgttttggaatatgtgactttttttttcctttcatttgtgacagtcaattttaaatgatgtcacttcaaggacattttcatttctcccacaacatattacatgaaacacttgcctgtaaaaccgggtcattagcctgcaaaattatactgtacagaatggctttcattcaaagtagaaatgggatttttagtaggcaatttctgtattttataaagataaagcaatgtttgattgctttcttcccagctgttttgcttagtggttataaagagaaatggggggcgggggggtaatgtgggggcgggtttgtaaagatgtgcttaaaaaataaatcttacactggaaaactaaggcagaacttcacggaacaactgcgcccgcagctctcctgggctgcagtgatttgtcctctgggttctggaggaaagctctgaaagaagtgagcgagagggaaagagggagggaatcgaaaaggttgcttcgcaggctgcagcacccactgcgagctggatgactgaggcactgggagttgctagaaggagcagctactcagaggtggggagagggagggtgcgcagcagagcgccggagaggagggacgcggaggccaccgaggggtcagcagggccgcggcgccagggtgggggcctccaggcggcgctggccacggttcacccgcgagggcgagcgcgcccggccggccgcgcctcctgccgtccgtgcccgggggtgggacccgcgccgggagctgccgagtgcgtggagggagccaggctccggctcgcctgatggattgacttggagatggatcgaattacaccatttgccgtgcatcggtttgttttgctcctgctctgtcccgctgctgctgctgctgctgcaaggggtggtggcgagtttcaggattctatcaaggaagccaagacctaaggagacagagggatatctatttttacaatatttttctttattttctttcttccttgcgcgtggcaagcttttttttttctttttcttttttcttaccagcctccccccaatgaggtaagaccgttttcaacaatttgctaatgctcttgtggcgcccggtgggggtcggaacctgagatcccgaatcgctgtgtgtgtgtgtgtgtgtgtgtgtgtgcgcgcggtgggggtcggaacctgagatcccgaatcgctgtgtgtgtgtgtgtgtgtgtgtgtgtgtgtgtgtgtgtgtgtgtgttgccactggacagttgatttattttccaagctgctctctctgcctgccgtgcaagggacgcgcaaagggctagagaggtttggcggacgcgtcaaaactggcaaagctggcggcttagggggaggggcaagtggacttggaggccctcctccactgtgcacccccttggaaaaaaagcggagggggcatcaagtaaaagtttcttgccaggcagagccagctcggcgtcccccgcacatagctggggttagcaggggttgcttctctgccgggcacagcgtctccaggagccagccggggagagctgagccaaggccgaaggagccgcctgcgggcttagccgccccctcccgcccgttggccccagagcggacgctgggacgcccggggtctggcagctctgcgcccggctaggagcgggcgggcgagcattagcctgcgtcctggagaaggggcgcagcgccgcagttgaggccggagcagcccctcgcgggcgtaggatacctgtcagtgagcgcccggattgcacggcccccgggtagtgcctgccggcgaggggcgggagctcgggtgacttggccatccccatccccggcccaggcccggagggcggccgcttcccaccgtccctctccccttactggcagagcgcgctgcgggcggactcccgggcccggagcagcccaccggccaccccaccgcccacccggctcccggtgtctcctcccggccgctctacccagcaactttccgtgctttgttccccgactggaaatgctttacggaagcgtcttggacagggtctccgccaggcgacaagagctcggtgctgagatgtgttacgttctcatctccccatcaattatggatggaaacaaataaggaagagtcaattttgctgagccccttctccggcaacgagaggcgttctgcagccgggagggagccgccgctcgcgccggcagccgctggcaggggcatggtgaggaggaaggtagggaaacttttatttcccgtcttgacagcggcggtgtttgtccctggtctgcagaaactgatacagtagcctccttccttgggtaatttaggagggcttgaagcttcttctgtcatgtgtaattcttggattgaaatgaaaggtcataaaggacttggaagtgtgcacgagaattgggtttgaaaaatttgtgctccatccactcttgggaccattgctgtcaggtgattgtttaaatcctgaacttgttaaaaggcgaaatgtcagggagctggcgggggtgggggtgtggagggggattgaagtcccggtatgaatcgcagcgtttgaggaacttagggcagtactccctgttctggggtgaccattcggtaactgatgttccagcatcccgagccctcagcgccgtcagctggatgatctcacagggaaggcgcagcacatcgttactatagatatatagacttcgtcaacagtcattggaccttatgtctgccactacagcgggggctttcctttaaaaataactgtagtgtttcctgttacttggggtgaaagggcaatgagtaggacgatttttccccaaaacttctggcggtaagaattttaagtctgtaataaaaattatgggtgctttttaaggttgcccttccccctacttgatatttggggccattaagtggattattttgtttattccaaagctgaagtccctgggaaaggtctaacatttttctaaactggtttgatctctgtcccttagaataggaaaaatacttgtttgaagaaaattttcaaggtttcttccttgtagtataaagaaatctcatctcagaccgctcaagggaaggattttactctcctttggtggcttaaaaacagtagcttttgatactggtttactcttgctgttaaaaaataaatccccttactctcttaggtgtctaactcaggaaattaagttgtgtgtagtcatgtttaatgtagtgagtgacaggcatattctttcaagctggcagatattacacaaacatttactctggcttagataaatagaaaatgccagataagctctgagatttgggtctatattaccatgaacctaaacatctagagataaataaaccatagttcagccatagctgagttttgttttttatagttactgtctgtgctttgtttggtttaggtctcttagaatgtacttccagaaagacagttaaatagataaccctaaggcttccaaaatgtgttgttgagcagactgttttctttcattggcacattttgttagattaacaactagcaactatttcttactgcatcctacagaatattcctacctggccttattcctcgtagggatgctatatcaataacctttctttttttttttttttttttttttggaacatttctgtgactcaggagagtatgccagaaatgttgtgacttcttcatcaccaacagctggttaacttgagtttgatttagatttgtgggcattttgccgtcttcctcttctttctctctttttttcttttggtgccctctaatagcaccatctggtcatgtctcccctggtttgatgggttgatggatttgaaagatggctgtgatgtaaatccgttagtccttagagtgaggacaacttagaaatccagaagacttcagttccttgctgcatgcacagaaaggctctgtccagtaactgtgactggggtaagcaggcccctacatcaatgtcgtggtttctgtcgcttgaaaggccacaagcaagtaaacaggaatcagagccttgattcacaaagatggccataattgctaaagacttattgaaactggagaagttcttcacttcttgctgctccatcataataaaccttggtaattagcttagtcattgttcttgcatgtgagtttcactaagatacaaagagtgaaaaatgcatctgaaatagggtcatttttcacccttttgatgcattttatgcagagttaagagcctggctgaatgcctaaccattagtagtgtaaccgtaggaggtgaactctttccttgttatattgcgtgataaaatattgtcttttattttaattgatagactttaagcctgcatattctagatgcctttctagaggaagcaagaagcagttggggtatgccaactaggcagtatttactgaatatttatcatttgcaaggagctgtgctagccagtgttccaacaccaggtgagccagatatgtttctctgtattttcaatagagcaaaaatagaaggaaataaaggatgggaaaacagaccttttgacaagaaatgtagatatgcttctttctttagaagtgtattattttattctagagattttaaagcaagattatccataccagatatttgcagtggtgcagcctacctgcctttaacactagtgaatgattcaatgtactgttaagtgtaattcacgcattgaatctgtccttagagtgagagatctcactttctgtggctcatgtgaatggagacttagtgttaatatctaccaaagctagtgtcttgggttgccgctgattttgtgaacagctgccaacttccaattggggaaaaaaaaagtgttctgatttattcccatgacacacggagagaataaaaatcacataactattttaaacataccataacactttctagttgaggtggctattgtcaggtggagttttcctcctcacacctgacaacactggcagtgccactgataattgaagctgcttgcatttctcccaacaggaaaactactagacgttcttactttgaaaaacaaccatttatgtaaccaagggcgatcaaatcagtggtccacacagataccacatgaggtgtacttatttctcaaactttccttttctattaagcttttgttaactcacccagattagcattttaacaaccctgaagtgaacttctgccattctctctgcttggacacagtatgtagatcatccatcatcctgtccttggctacaacaggctgctggctctatcaccatttggagctacatggaatccatccggctgtgaacagcacagctggctacagcaattttttcttctataccactggcagtattgtctgcctgtggtaactaaagttaacacccagaacgggaagtttccattgtttggcaacctgtcccaggcccctcatccagttctggggtcacagctactgaaagtccttgccaccttgcaatggtgtgttccatttaaaaggaggcttgccccaaccttataccaccacaggaaagattcttgaggcctgtaagatcaaaccaccagaatcacagaattagaaggagccattcagccaccactcatcttacaccttcagaacttgagtctacttgaaaaggggaagaaaggaatgaagtagccttcagcctgtgatcccaaatgactgaagatagaaaaaagaccttttttggtgaactgagcaagttattgctacatcccttttcacaaagaacacgcgatgtacctaaatatggggcccgtgtgtactagtgccgaaactttctgtcgctttttttttgttttgttttcttctttttactcaataagatatctgttatagtagccattgcttgttaaagcaagaataacatgaattagctggctacatctgtaggttatgttgccaggcttttttgtttggatgtttaaactttcataattaggaatccagtttttggaaattgatgtgtcaaggggagactgcctcatgtttgggtgtgagttagcatgtagtctttcttctctccataacatttactagtgaaatcagccacaaaacatctgaaggatgatggtgatgatgatggaggcggaggaagaagaggaaagaacagcagcaaccacaatacttaacacttaatgttagcttactaaattctaggcaccgtcctaagatctttatattggttatatcatataaccctcagacagctctgtaaggtgaattctgttattatcactgctttattggtaaacaaagtgaggtgctgagaagctgtcattttcctgaggttacataatggaaaggtggtaggggcaggatttgaacttaggcttcccgacatctcagcccactttttcaccactgcaccggattgcttccaagaacacagaccaccctgcagttttctgacttcctaatacttctgacatttgcttttcaatgaaaaagtcatgttttgggggaaaattgcgtactgagtgaaattatatgtacacggtggatgtgctcttaaattaccatcttttttctaatctaaatcacattgttatactttactttcattttttatttccattggccgtataattattacacacccttcttttcaagcatcctagaacggtatcttctcccaccatttttctccatgttaggctttcctgtccaagattacagtggcataggacaaatggcaatattcatcactctccaccaaaaagtgcttctgcgtccgggtgtgattgacattcatttccctgatcttggcaggtgaagatccattacgtatctttgtcccatttcccggggggaatttatgggccccatcagcaaagacagtgagagctgcagctgttcaagcattagtggcaccagtatggaaagtgtattactgaagttaaagtctctattagattgtactatacatttttcttagttatgatggagggaaaatctttcaatcagatacattgttgagaaattctctctcatgcatcagcatttaattctctctcatgcatcagcatttttttttgttctttttttattcaggatctctatgagaagaaacaaaaagggaaatacacatgaccactacacataatactgaaatgtaaggttctcaacatatatttacaggaaggaatatgggtttttaaagcccaatatgttggtacatatataataaggcctcaggaagatctgcaattacttagcctattattggagtctgtacttaaaaataacgtcaggagtttctactcagctgaggaactggcacataagaaccagagcagacgaagctctttgagaaaataacacttctactccccaggagcaggctgtcagcaaagcagggactgagattcccctctccactggcctacgcctcacttgttagtataagggtctttgcaagcattttttggtctacagagttgtctttatttatcagtaagtcttcaggcctcctctgggtaattggtggatcaaataaagatatttttaaaagctacagagggagaagaggaggcagaagaaggaataaagaatgttgcagttgttcttgccattgctggcactaacatttgttcattcagctaacttttaccctgggtctactctgtacaagtgggtacagggcaggagagggcccaaagaggagcatcacacaattccagaggtcagggatcttactgcgtgctgtaggaaaaacaaggtgtacaaatagctgaaacgctgtgtgttttaagtgccagaaaagatatacacagacttagggaaattgagaagagtgagaggttatttctggctagggtggtcagggaaggctctgtggagtcactgatatttgagctggttcttgaactaggtaggatttggacaggtggacagtgaggggtggtgggggaggtgttgagagggagggaattccaggcatagagaacagcttaggcaaaagcccaggggtggggtgggggtgagggtctagatcagttgtccatatttatgcccttacctacaacagacttgtaattcaggtgtgaagaggcagtttgccatgcaatccacaaatatttattgagcgtctctggtctactatacttagccattcagcagatggccctacagcttaagccatcagaatgaataggatcaatcttgtggcaattcactagattgctccgtgatcaggactaaaacccgcacatcagctgccaactggttcagtgatacacatgaacgttgcaaggagtaagatgatttgcctcaaattacccagcaccaagttcctctcatagagttgtttagcagaaccaaactgaaagtctgtggcttcactggcttcatcttttttcttaaacttgaaaaggctttagatgtagattctaaaataaagaatacgtcgcatatgtatatgaggatttttggaggggagagaagggaatgtgaagataggaagtggaagagaggatagacacatattgaaaccatgctcatatgagttggactctaggtgctgcttagactgcaggttttttgaggctatagtgcatgctcatcactgtaagctagcagagggagtgacacatagtagatatgcagcaagtgttttaataaatgcgctaattgagtttaacttttattacattgcagatatagtttatcatggctggtaaactgaaaggaatgaggttggagctatgacaaccttttcctaatagagaaaagggaaatgacttggaacgtttttaatacttccttttggaaaatctcattttaaggttcccagggggaatcagcacccctttcagggcctgagtcttccagataaactcatctgccactaacggtccccagtcccccactttcccacctccctcaccttcccccttggtcctgccatactcaaccccctcacccaagataacctgtttagacattagagttcccaagccatcattaaccctttgattaacataaagtataatcaatccatggttaagtttaatagtggaggtaataagcttcaaaacaggaaagaccagaagttctgtgtagtataagtatgcttattaaaacacataataaaggaaaaataaaatgaaaacagttacattagggaatgatcaagtcaattgctttgccaagaattgctccaggggttcaattttccatggtatatttaagtctgttacaagttaatagttatgtgacagatagtcttagagacgaatcttaagtctgaagaatcactgccaattaaagatcaatcagaaattataaaataggtcaatagggaaaaaggattaagcatatacaaattcaatgttgggaactcttcaggaatattcgagtgacataaagcagagaacctgtttagtttagtaatcggtctggctcccaccccgttgcttgttgaagcgaagggcaagctgcctccccctgcgcagagcacacttgcctacagacgggatctaaaataaactggcctggttcaactagactaataataacagctagcacttactgtgtgcttaccatgtgccatggcacagtgcctagcacttcaaatatgttatctaatttaatcctcactctacctctgggagtataggactaatagctaactaagagccaacatatattgagtgcttactatgtgcctggtacacttttaagaacatgtattaaatcatttgatcagcattctttgacgtgagtaacattattaggaatattctcattttgtacaggaggaaactgagtcatgggtgatgaagtcattttcctagggtcaaacagctagtgactagtggaaccagggtacctggacccatgataggcagtgtgagtaagaacatgaactcttggagtcaacttcgtgggggctgtgagttttggagtgtgactgataagctgtgtaatctttaacaaattacttcacctctttgagactcattttcaccttataaaaggtggatgatggtggtaatacccacctcctaggggtgttgtgagacacagatgaattaatatttgaacagcacttataatagtgcttggcatgtagtgagtgctataaatatatcagtgtctgttaaataaaaataaatgcaggctggctccagagcctatgcttttagcccttgtactgtgctgtcttttcacatgtgattttatcctatttctttaactgatatatgtaccttgaggccagttccacaacagctaccctgcactcccactcactatacttgccacacattcagccaaactggaaaggggaatttagaaggagaggttcagtgggctggagatttaccctagaccttggcacccttttgaagattcctaaccccgatgtcagctgtttcagaattgtggtgtcaaaaatctggcttccactgtcggtactgttgaaggactaaacatggataattagcacatgttctgtgctggtggccctggggctattaaaaatctgaataatgtcataaaaatttaagcacactccaggccatctctgtcgtcacgcacatctttgatctccaccagtggtcttcagactttaaatttcctcacaatcatatagggttaaaatgcagattcccagagctccaacatcaatgggtctgtttcgctgcgtctggaatgaagcccagtagtctgtgtttttaaggaacacttcaggtaacttgtgcccattgtcccttcaccacattttgagaaatggtgctctagtgtagccagagctcctcaaacatcagtgtgcctacagattgcctggcatcttgctaaaatgcagatttctatccaaacaaggtgctagacctcagggctactgttggcaggccactcagtagtagatctaagacctcttgcctacggcacgaagagaatgattatgagctgaagacatcccagctagctcatgaaagactaaagaaagtaataaaatctgctcagagctaaagtggcttcccccccaacccccccagtttgcaaaggatctttatagtgagcagaaattatgaaagaaaaagggcactcacttatttctgctgaccggcctatatcatttcataaatgaagtcctgggccagtattcatagcaacagtttttgatttaatgataaactgagataagggtaatcaaacttcatgcttcagggcataaggtgattgcctgctgcggtcaggatggaattttttcccttgtgctttgcacaattgactagatgcattagagagagtgctcaagccgtgcttggaagagctggaggcccagcagaaagctccgctggctgagatcatatgggaaatggtttgggttgcagtgaacaacccccatcatcatttggctttatcatttttgtttcatattaagcttctgtgtaccgtatgtgtgtatttctataagccacacaatgaagctgggagcatactgcatttggaagcagatgccctgtactccagccctggccaacagaatgagcttctgagttacctaaggaaagcactccccacttggagactcagtttcctcacctgtggatcccttactcaccctgcacgattagaatgagcattaaataagacagtatggacaaaagtgcttcataaaaaccagataggtgctgctctagtgaaaagtattattatgatacaatgaaatatactttggggaatcactttattataatcagccatatataaattcatactctgtgtggtgacatcataaacataatgacagcaaacatttattgagttcttaatctgtgccaagcactgaagttttgtttacattctctcatctaatgctcatatcagccttttggggcacttagttttacctctcattttatagatgaggacacagatgctcaaggagcatcacttagtttccgatcgctgttgtaacgaatttccacaaacgcattggcctaaagccacacagatgtattattttagttctggaggtcagaagtctgaaacgggtttccctgagctaaaatccagatagcagctccaggagagaatgtgtccttgccttttccagcttctcaggctgtcttcatttcttctcacacgtgacccttttcctccatcttcaaagccagcaatcctatgactgagacttcttccatagtcacttctccctctccgactcttctgcctctctcttccatcttcaaaggacccttgtggttagcttcggaccactcagataatccagaataatctccctattttaatatccattacttaattataatgcagagtccctctcgccatgtaaggcagcatatttacccattccagggattacggcatggacatctttgaggggtgtggacattattcttcctcccacagtgaagtaccttgctaggagcgtgcggccagagtcagaattcacacccaaggctgtcacttcaaagtccagcatctcaattactcactataaacccttcgatttaatcagtgaagcaaacaataaaatcatagaatgtgagtggtgagaaaagccctgttgcttttagactaatccattggggacttttaaatataatcatcatagtagtaacaacacaaacattgacctcctgatcttcaagtcctgctttgtacatggagtcgttcatttatttcttctcagggtgtatattatttatccaattaaccagatttacagggatccctgaatccatttgtctttcactggataactgaaggaacaaggagcattttgggggccaagggaccactttggaggtctataggaatgtgttttaatggaactactagttcagcaaagggtagttgaagaaggatggcaggggcagttgggccatcattttctggctctggcactgccccttggcagattggatggggtttgtcaggtaagatcaccccactccatctgctgatagccaagtccatttccagcctgtgaggattgatacccacagaggccaatcagaaaatccagagcctatattctgctaggtttccaaagaactgtagaaagctatcagagatccctccctcactctcttacccatctctcccgctcttctcttcactacacacttagctaatctctggtttaatgtaactttaaagttcaaaatgtgtgctcattactgaaaaggctgtcagagcaattcgaaaaaggagctgagagtctggaagaacacagcctagctgaactgttagacaaccagattatctgtggacaaggactggccttgctagccttagttttctccttaggacaaagagaggtggtgatgggcgggagagagtctatatgacctccagagttctttctagtagtgagatcccttaatgctatgtttatcttcccattttattttagtttagtttagtttagttttgaaggaaaatttatattattttaattattttatgtacagaaaactcaacagtgtacatttaacccaatttagtggcaagttctttagcctttgccttttcgagcttggcgatgcgagccacagacttaggatccaggacgttgccgccccagtgacggcggatctcatcgtatctgtcgttgtaattggtcctgatagcttccaccagcttagccaaagcgcctttgtcttccgagttcacctgtgtgaaggccacagtggtgcaggtcttcctgtggactagacgtcccagtcttgccttccccttgataatgcagtaagggacccccattttacgacacagggcaggcaagaagacaaccagctcgatgggatccacgtcgtgtgcaatcagcaccagctgagctttcttattgtccaccaaggtggtgacggtgtcaactcctgctcgaaggacaggtggtctcttcgtggggacatcccctttgccagcagctttcttctcggcccaggccaacagtctctgcttcttctcttgctttgtctctggtctgtacttgtgggccagcttatgcagctcgctgtttggcggtccagggcctgggtgaactggttaatcgcaggaggcactttcagccgcttatagagtatagctctctgccgctgcaacctgatatagtggggccatttcacaaagcgggtgaggtctcttttgggctggatgtcctgtccaatgccaaaattcttaggcctttgctcaaacgggattcaccactttcttagcctcctgcttcttcacgactgcaggggccggagccaccttctttcccttggccttctttcctttcagcatcttgggcagcgggaggagagagcaatcttcctattttaattacctaagcagtacaatcaaataccatgctgattttagaaaatattaatctacttcatgaatgtgcatgtagctacctgtgaaaagagacagacacacagatagtccaacttctcaaatttattattgccatttacattttgcaacactttgcccttttcttttgggatcacgtaaacttcattgctgctaatatagttttgagactcaattttcagaaatacatagataatattttcagttagcagtaattgcacctcattcagctctcaggggtcgatgccttacctttgcacaatttcccagtaattttcagttatatccccaaagagccactgcccccccgcccccggttgaacacatagaactgagaaggcaaatgagtttcaaagtagagagccaaacctgacttactggtagtggctgttacagcttgtgcttcagaaatttgtaggcctgcatccaaggacaaagagaaagagaatgccttcatagattggcaaagtgttctatgaaaaagggagagtgtatggtagccctcattgagcatggtctttgtacaggttgataagtgtctaatgcagatgtcacctgaagtgatgtcccagctagctgcaagaacagagcttgaattatctgatccatgggaaggcagataagtaacttccaatgcataaaaaaacttggtaattattactttacccagttcttgccatttgatttattttgttgcctttttccacaattattcctgctgtctttaacactccatcaaagattcaaaatatatgataaatggttatgctaccatagatatcaccttcactacacatatatgtatatgtatgtacatatgtccacgctatacataggtgtatgtaaatatagacatatataaaaatataacacaccacacatagacatgtgcccctatagagattttaaatgatagccttcaacgtcagacagacgtaggttggaaacccatcctgtttccttaacagatttgagaaattgggtatatcactagacctccgagtctagtttccttttctgtaaaatggagaaaatattcttaaagagatgtgaaatcggttaaatataatgcatggaaattgaccgtcacagttcctagaacacaataaggtgctcagtcatgttgggttttccattgttagtatgctttggactacaggtaagaggaaacctaatttaaaattgcttaaacaattaggatcgtattaagtcacatagtaagaagtcctgaaatgtggttgctccaaggttggttaattctttggctaaacaaagtcatcaaagactcaggtgttttccatgtttcttctctgccattctcaacctgttaaccttctgctttgctagctccttccatgttcctagtaggactggtacattcaaggtgagaatccaacagatcaagagacaaactctcccaggaaacctttcctagtaacagattttcccgggctctcattggataacatcatgtcacctgctcatgtatgaagcctaaagcagtcttgggcaggggaatgggaccacctcagttgacccaaatgggagagattggcttaccagtggatacacaaacaaaatcaccattttgttatagagaattatacattgttatttataccattgttatttatacatattacctacacatagtgtacattaaacacatttgtgaatgtgctcaaactattcaaagtttggtgtttggccagcaatgtttttctgcatgatttgaaaattttgcatacttggaacagaatttgcatttgattaggcaattaaaaaaaataaaagatatgacactgcaagaaaatgctacaaaaatgtaggcaggattcataaaacgacttctctttcactatacttccatatttgtttcctgtagcttcttttaaatgagaaataagatacccctgccagattaacactttgaaacatcatagtaaacacgagccgtaattatgaaggcatttttatctcttgagaggtggagacacagatgctaactcgattctcttcaactctgtaagacatttcatgattataaattcacattttctcatggttcctacttcaaaaagctcattaacccttaaagctctaaagctaaagtttcgtagtgtttctgttacatgtgataaattctgtatctactgaggacaggtacccactcacttttttttaatctttcttatcacttaatgaaatacactgcaaactacctaagtggaactcttggcctggctccgagtcctccttcaccctgtcctgtttaacctcttttcctggtacaataatacaataaatcagtcctaagacatcataaaacacaggtaaggaggctccttctttacctctctttgtacagctgatgtttctttgcaagaagctgtaaaaattaaccacctagattttcaatatttgaaatttctactgtcagtgttttctagttgcatttttgttcaccaaggtaaaacttcactcaggcttcattgaatacgagtcttgttccttaagggaaagcaataacccttgcttcgctactctctctatattcagcctgcaattttccttcccaactgtgcatccttgtgagtccagagagtccggggttcaaattctgagtctgccacttaacccctcagagcctggttttcctcactggaaagttaggataatatttctaccaaataaggatgttactaggtcttcaggaggacatacatgcaaggcacttagcatggtatctgacataaactcactaagttatagtagttttggtttttatatttactattttcaaatcaaggatgtttggcaatatgtaaaatattcatataggaaaggcttatggattttatacatggattggttcctcccccaaaaaaagtatttggatggctacttctaaaagcataaagagacagagaaaatataagaacaagtctgcatgtggcatttcttgagcccatcagagcacagaagcagcaccacatgtacacacggccactcactgctgaacctgattctggagacttgtttgtgatggggtgggaaggtttatcatgttgtgaagtattttcagatgatgaattttagaacgtaaatgatggacaaagtactcatagtaactttctggattagctcaacctgtccctcagtcgtagtagtaatttttaagatccctctaggtatagaagcatcttactcactcacttattcattcattcatttattcatgcaacagataattttagagcatcttcagtgttcacagagcttttcttcccctttgccttcaaagcatcaaagtccagtaaatcatggaacaactgcatgtagcatcagtttcctgggtatgtgacctggagctgcacttggtcccatgcttggaatgttctgctgttgccatcttcaaatccttaatttttttcgaacaaggagaaccacacttttatttacacagggccctgcaaatcacgtagctgatcctgacttctccttgtcaccaatgaaatttactctgtattgatctgagtaagcagacatgagttgaaaagagccacagaatttgcgtcttgagtttccactgtgtcacatactcaggaagctacctaatttctggtccttggttttctcagctgtaaactaaggcagactacacatggtctccaagaacatggctggtaatcttgatacctcagggaataagacataggtaaaataatgccaagcctaggtttgagttttaagtgtggtgactctactttcaaaactagaaattaggggattatgggaattatgggaccaaaataaaaattgaaattagcactcttcttgagaaagttgagctgtgtagttgaaatctttgacttctagccaaggcctacatgcagtttggtggtttttaaaatataaaatcaaattgattgagcactgttattattctgctcatttcatttggatctgtccttttgtttctgtagattttatgctaatttcccagaagagacttaactcactcctgtacttttgccacacttaaaaaaaaatctatagccaagaccttaaaactctaatatacaaatattgacatccctgaggattttctgattttcagcccaagaagttttgtgtgttgggagattataataaaaatatgttgccagccctctggcatgggcactaaccaatcaaaacagaccccacaatgtggtaccaagtgattggcagccctacagtcttacatgacaacaataacttttagagaaggcactacggtatagtcatcatggcccaaatatctgttctccagtgacccagactctccaagatgcaagaaagaggtaccactaaacacagtgagtctgtatttattcagtgtgggaaccaagatctctcctagttcagtcagcttgcacctctgcaagcattgctacaaagtctgtattaaaagttatagctgtttaatggcagacacagacttcagatacacttgtttttcatccacttaaggtcactgacaaatggaaatgataaaagacatttcagagaaaacaaacaactccaaattaactgagattccacaatcatcatttttagatacatcttcagttctgcttgaagctgtcatttacttgagcaaatttaagatcacaagagaatgtgatgctcagagtgtctctaatcacccgcctaaacgtttgcatcattaagttggtctctccacttcacaagcctgccgtcggcctgaagagatggggagcttttccgtaatggtgaaagcccacaaacaactccagtgtaagtcacagtatcaagccaattaagatcaaacctatgatgcttagttgtacacatttcatcacttaactattaaacaatttttactttgacactaatcaagaggtgttaatgcagattcttttaaacaactcaagtgatttagggtgtgtgtaagagacagaaggagagaaagggaatgattgtcttttctactttccagagctatctttgggcctcttaaaatttgttatccagtttgtggggtttgtttatttattgacttagcttaatttaattgtattcaatttattttattttattttgttggagaacattctgacttgagtctgttggtctgttttattgtgtagcagtaggctgtttagcttagaagcctactaagaaatgagggagtttacattttagctcccaagcccctaatggttggctaactgtgtttacatttgtattagcattgagtgggctgatttgaaaagagccacagagataagagaagtctgactccttgtcaccctgacagaggcagaattgcagaatcacccttatctgctatgattatcttacgactgagaaaaatgctcaatgtgaccaaattttgaaatagattcagtgttccaagcagctatgtatcttcaaagtaaaatataaacaagtcatctgtagaaatttgtttatgaaaacacagatttactgttttgctacatatccagataggaatttacttaaggcttagtttgtcgcttatttggatcgtggtgatgtagggtgattactctagcaaaaagcaagaaggctggtacagaaaatgtccttacttcctgctgtcatacacacaggactttaagcaggattttggaatttaaataagccagaacttccttctccatttccctgtgcatgttttagagttgaggaagatcttaaataccagtatttgaacaactgaggtacaaatgtttttggctttaaatattcaagtacacaattgcaatcagttttttgtttgcttttactggtgtagattagaccactgagaagtttaagccaggttttcttactcctgtgtgattgtaattcttaacttttaatacaaaagacaatccctgtaataccagcaccaagagaacggcggtgattttgaattggcatggatctttgtgaaaatcagattaaagttcactctaaaaataggaattgctgttgctaattttattttagcactttatatttcagaagcttaggaaggaaaaagtaggaggtaggaaggaaaaagtaggaggtaagaaggaaaaagggagcaaaaattataatatgctaatttagctgaaatctcttaattaccttcgtgatttcttagggtacacccacagtacaaataaaacaaaacataatcaaggacttgttctctaggaagttatcctctagaataattacatatttcaaaaatcatatcccataggaccccagtactagttcttggttttattgaacagacagacaataactgtcttcaccaagaaaaatgagctgtttatttggatggaaggtaacttaatgttttttagtgaagcatcttcccatcctcccttttttaaatgttaaaacaattataaagtattaattttaaaggggaaaaatctaaaataacttaaatttttaaaaatctgtttccttctagtatttgtctatatgcatctccggttttataaagttgtgatcagtgaacataaaccttatattctgattttttttccttcctagtattgcatcataagctgaggattactggttttcattattattatctgaatgattgcatcatatttcatgaggctagtgtaatatacttttaactgcttctctgtgtttacaattttaagctgtttccagtttgttcaccattataaaataagtttcgtttttttccttcctactttagactatttgctaagggtaaatcaccagaagtaaaattactaagtcaaaggttagttttctaagtgtgtgttgtgtatgtaggagcatgtgtgttacacattgccaaattattttctaaaatggttgtactaatttaccctgccatgtgcaatatattgatttcatcccaactttaccagtattatctttaaaaaaacagaagctaatttcaccagtgtaaagttgtgtctccttcgtaacaatttgcatttctagtattgctatcaagaagcctgataaacttaaaaaaaaaaaaaagggttacatatgcagaacatgcaggtttgttctaataggtatacatgtgccatggtggtttgctgcacctcttggcccatcctctaagttccctcccctcaacccctaccccaaataggccctggtgtgtgttgttcccctctctgtgtccacgtgttctcaatgttcaactcccactaatgagtgagaacatgcggtgtttggttttctgttcctgtgttagtttgctgaggatgatgatttccagcttcatccatgtccctgcaaaggacatgatctcattcctttgtatggctgcatagtattccatggtgtatatgtaccacattttctttatccagtgtaccattgatgggcatttgggttcattccatgtctttgctattgcaaatagtactaagaagcctgactttttaaaaagactgggacaagacattttagggacaagtttctactgtttgacacatagaaaagcaatctgaagactattactagggaattgtcataacatctgtattctgaccaaagactctctgtttctctggaatgtttccagctctgacagctaatttcaatcttcagctggactgacaggaaagagcagaggaagcaggatttcaggataaagcgagtgctgaggggatccagggaagggttcatttatccagccaccatcccacaacttagtgcttaaaactaccacgatcatttgtttggcccctgaatctacaatgtgggcagagctcagcaaagactcatcactactctatgtagtatcaactggggtggctctagtaggtgaggggggctccaggtctaaggtgctcattctcatggaaggccagtgggtgctgcctgtcagctcagggctcagctagggctgacagccatagccttagttcctctccctatgggccacttcatgaggatgtcttcacaagcagcttaggctgtttcatacttcagtagctgggttccaaccagtgtccaagaaataggaagtggaagctgcctatgtattaagtcctgggctccaaactggcacagcatcacatcaccacattctattattcaaacactcatagcccagattcacagggaggatatatacacccacttctgaatggaaacaatataaaaaacactgagagattgtgtttataaactgccatacagaattttcagccctttgggaagctgaaaaactagatagttggagcacagtggactagtagatattatagcaccaacctccacctttgctttccagaatagtccagggatgggttctccgttaacctagtctaccttttccacaacaaagaattcggccaggtgcctcttggactgacttttgcactgtggggaatctgcagtattccaccaccccccgcccacacaagcagtcaggtctcagggcttttaatcatctgtgtagttgctctttcctgttaagataggttttagtggtgggtctgagcatgtgatacatctcaagaagaataatgacattaggcatatttggtccatgtacactggcaagatgcttaacttctaatgtgttgacagccatatgtatgagaatcccacctgattgctgagtggttgatttaggtgtctctactactaggaaaagggaaattatttgaactgcagtttcttggtccagtcttccaaagaatattccaagagagaatttggaacatagaagaagatactgaaatcatcagagtggtcttcagaaaaggttagaatatgacagggcaggggacacagcagtgaggaagcataatgatgctaataataatatcaacacaataaccataataatagctaatactaattgtacttatttgcataagtttaagttttccgtatattaagtctacaaccctggaaacaaccattttagataggtccaattattttctacttttaatagatgtgaagtgaagtagcttttccaagatcacaaagctagtgggtggtgaagccaaaatattcataaagtagagcctgcttttccattggtttatatgagggtacttatcctcctgtgtggtgagaggatggccatcatccaggaactcctgagggtttcatgcattgcgactcatttttcagccattttgtcaggttgggttatagtatttttgttgatagttgaaaatagaaagtaaaaaacatggccgggcgtggtgactcatgcctgtaatcccagcactttgggaggctgaggtgggcagatcagcaggtcaagagatcgagaccatcctgaccaacatagtgaaactccacctctactaaaaatacaaaaatttaactgggcatggtggcgcgcgcctgtagtcccagctactcgggaggctgaggcaggaggatcacttgaacccgggaggtggaggctgcagtgagccaagattgcgccactgcactccagcctggtgacacagcaagactccgtctcaaaaaacaaaacaaacaaacaaaaaaacatagacaagccttccagagatagagacttgccctctgatatagttttctctcatatccactctgcctggtcagcaagatacttaaaagaagggtttcaaagggagcctctctaactttgaagggcccaggagccaaaggagcgagccgtgagccctcagtttatttccaagcaagagcacctgagcagggaggtacccaatatactcttttccctgaccttggggtaggtccctgctgcaccactgcctggagacaaaggcttgatgttaggtctagggtgacagggaagaggcctctgaccactggtgacccttaacgtcaaagataggtaggaggaagaggtggaaaccaatacttaagatttagggaggcaggatccttgctagctccctgcatgaatcttctcaattacttgactttttcatagaaacttttacttatttatttttctgacacagttacctgctagactattagactagaaaggggaaataatgatgcttatgtcttaaaataacaatcataaaatcaagctaaaaaactctgacagtattcttatcttaataaattcttaagttcctctttctcctctctgttccttttcttctgtgttatctttctctgctgcagggattaagactacagacattgaagtcaaactggcttaagccccattatttaattttgtgaccaaaggcagattacttctttatttcctcatctgcaaaatagcaccaacctcctagggggtgcttattcttagcataatgcctggtgctttgttagcatgcaaccctggcttgttataatcagctctaattttccggtctgtgacatctacgtattaaacctaattccaggtgtgtcccatgaaaacaaaataagaaggccgggcacagtggctcacgcctgtaatcccaacactttgggaggccgaggcgggcagatcacctgaggtcggcagttcaagaccagcctgaccaacgtggagaaacctcgtctctactaaaaatacaaaatcagccgggcgtggtggcacatgcctgtaatcccagctactcaaggctgaggcaggagaattgcttgaacccaggaagtgaaggttgcagtgagccgagatcgtgccattgcgctccagcctgggcaacaagagcaaaactccatctaaaaaaaaaaagtaaaaagaaaacaaaataagaaggttagcaagcaaagtctcttctgttagtagagcagacatgtgaaatattttctatttgggcctgggaagttatttctaccaataagccatagatcctgccttcgaggagctcacagtctaaagaggaagacaggaggtagatgagcaattctacccactgtggcaaatccacagtagaaatggatagagtgtcctgcgaggagagcagagagagggatggagagggtctgagactggcgctgggtcctaaggatgactaggaatttgccagtcagaggagctgcagaaggtgttccaggttcagagaacaacaggagccaagggcaggaggcctcagctgagctggccactcgcagaggaactgcagccgtggaaataagcatgtgaatactgatttgagcaaaagtgtaaacgatgtcagtacaccagggtgatgcaaactgcaactaaataaagcagtgataataatactacttcttcacacttgtatagcacctttacaatttttaaagtatttttactcacattttctcacttgtccctttaaaaaaaaaccatggtgaaagagggagtcaacagagatgcatccttccctcatctcagaagaggtgaggtaaggagggaggtgggagcagccagcggtgccttgctgcacgggagggatccctcctgtccttcacactggcctccgttccctcttctcccttgggcagcttggatgctgctgaaagacagtaagcagaaggtataaccgacccacttgagatagagcctagggcctggggactggtgattacagcacctcataaaccaggccaggcctgttgggctggggttgtgtttgtactaacggctgcttctacttgttgaatgtccactgatctgaagggtgtctgggactttcagtgcatatgacatgaaagaggtggctctgcctctctacccagcttggaatagatgcagcccctcaggaagaaacccacaggtccctccagttctttcccccagtcctgctagaacgcctttcttactctggttgtaatcctgccttgtccctgtatccttcatacaaaggaccccacaccctctgtgtttcctggttttgcaatcctttcttttttgtcaaagagctgcaggtctctatagtgagagtaggtggggaaaaggaaaaccagtcacactttttcctccaaagataattaggctaatttctctcaatcttttcaccaatgtttatcctgtttgcatgtctaaagaaagcaacattcttttttctctatgcctccccaggatgcctcctgtgattagaatagaatttgaggccctaggtccaaggcattggtcaacttaggaaatgggccggacaatatcactggcacactgctaagtcctatatgtccttcccaacaatttcaaaatcaagggaagtccagatctcactatggtcacatctgcagctgtaagggcaattgcctaccggaaatactgctgcataatttaatgcttaatttaataatttaatacataatttaatatgttggtgcgtgtatgtgttcattactggtgatcgtggatgacctgtcattagcaattcaccatcagtgggtaaagggctctgtggagatttttcaatgttttttttttcttgagaaggcacagggtcgcacacagaaattcattcaacaagaactattaaaaccctgtggactaaccacttttttgggagtttatttgcagacgtaaaaggcagttcctgaactcaaagaaacctacagtgcgggggagtaagttatgaaaagaaggaaacagactatcacgtgatatgtgctctgatgaaagtgagcccagattttcatggccggagaaggaaaagaaggaaaatcctggtgggaagtgatttctcatgaggaatcagtcatgaagaggaagggacaagaagagcattccaggtagtgatggggacagcacatccaaaggcagaaaggtggagaaagctgagtttgcactggaatgagggggtgctttaccatgcccgaaatttagggggttcagagaagtggcatccaaatgctgtcctctggtccctcttggccccatagctgtaagaccaatgctgaatgtcactgtggaacctagttttgatttttgtcaatgcaaatccattttgagcctctctgagattagccttggaggtcatagagcaatggacctggagacaggtgacccagaagcctcttgtcagcagtatgacctccagcagttctttaactccttgtctgaaaagcatctatttactaattcagcaaatatttaccaagtagatagtgagttccagatgctatggtgggtaataaagataaagtagagaacagacagacatgacttctgttctcctgaagctgacacgaagttcagtggagaaaataacttctgccctaagcctctaaggtcagctttaaggactagagtagatagacatatttgctttgaagagcataaaacactataagtgaaaagctctttccccaaaccctggtctaggctgaatatcaatgagagctaggcaccccaatccccacccacacacagaagtttattaaatatcagctgcaaagcacattgggaatgcagagagaggctaagaaacctagacagaggtcctgagtgtatgtgaactgagcttcccacagcacatcctacaatttaaaaaagatattggacatgatctgctagcctgtgggaccacctcacccctgggtgaggtgagaaagctcgaagagacacttaaaggccgtatttcccaaggacacatggttgtgggggggaaaatgcaccctctgccatttcatctgggacgccatcagaatgccaagtccacattcgtaagtgccagtggaggctcggtccctgttcaaggcatcagtcagtttgtagtacaaagcccatttgtggttcagcgtcacagatcagaggcagcgatcgcgcactctcctgtctcagggtacagagggagcacatgcactttgtatcctaggcaacggcaatgctacaacaaaaaacttagaagtgtgaattgggaagaattttactttgagtgaagaacctttttcaatgcaggcaccaaactcaaaatcataaaatgtcacaacttggaaggggcattggagatcacctgcgttctcattgtatagattgggaaaccgaggctggaagaggcaagttggctttctcatggtctgtcagatccttagaggctgagttaagagtagaatccagattttttacctccctattatctccaggtgtgtttaatgtttgggataagattaacatcccccaaggtgattcataaggaaagtgagaacaaatgtagataagggtttgaagcgtaattatctctggcattagaaccacacacccttcctcacagttgtacctttagccttgaacaggcttcctggtactcacctggtctaatagtgatttttatggtgcttaccatgtgccaggatctctggttcaagaactccttccgtcctcagcaactctatgaggtagctgctagtgtgatcctatccccaacatacagggtaatggagggaccaagtggtgaactagctcacccaaggtcagatcactggttgcgcagcaaagctggggcacctacctgggcagcctggctccagagccatgttctctaccccgtacgccactgctcaacgcttgtcagcctccatccctgacagcagcaagggctgagtttgcttaataccctcttggtcttgcatcaatttagtgaaaattaggaactgagattttaagaacttgcatggattgacctaaactcccattttgcctctgtggacccagaggtttcagaagttcatagtccatcagatacagagcctagacaaaaggctgcaggtaatgcacaggtgcactgactcaggcttagcctgggcgctccctgagctttgcaggacttaaaattcacctgggctgtttattattctcattcttagttacagctccatttttagtccagatctatcaaatggaacctaacttaccatgggccacatttccatcagtaggaaaaaatacatttaaaaaataattattttgaaataattatgaactcacaggaagttgtaataatagtacagagagttccatgtccccttcacccaggaagtacattttaaaaaacaagttaggattgacttacagaatcctgataaggttaatgctctaaatctttctgagcaatcagtaatctttctctacgtttgttagagacaggcaactgttactgtattttcaaatacagaaggcaaatactaatacaaaggccttatttttggtgaccgaaaaccaaaggacttgggactaaaaattcttggcttttaaaatttcacttctcttcctctgggtcattagagttttaacccttctgtaaactcatcaccaactgttttaaagcatgacatcacctgagaacctctgatgaggcactttgcagaatatcaaacctgaagatgtgagccttttaaaatagagtgaaatcccattgttgttggcagtgatgctaacatagatcattgaactctgttgtgacatctgggttctgcactggcttcactactcctggatcataagtccctcaatttatctgcttgacctttgtcagacaggaataggagcagcagcccatcctcagtccttctttgccagggtattgttcatttatttgaaagcctggaaaggcttcatggagtacattgaaagctatggctacacggtggttgcatcagacaagtcagtagcatcagaacaaacatactctacttctgtcatccgagcccaaagggcagaaccaggcatagacccaggccctaatatcctgaacagaaagtcacatgcaggccatatggcagcctcagcaggtcatctggtagaataagccagtgttccacagacaggctgagtcctttggcatctgggtcatcccttggaaccttgagcccttcctttgtctagaatggctccttttcctggaggctgaaggggaggagcccagtctggctgggatatgcctgtggaggagataaccaaaaaagaaggctttccatttctcttgtcattagttagccttgaaaacccttcggttcccctgaaaaaaggagacacgattgttcatttctgccacaacagtctcctgctgtgtgtgtgtgtgtatatatatatatatatatttcgattgtagaaggttccttgtgcattatactttcacaaagcaagttattatattgatgtcttaagaggctgatatattttgtcatcttcccggatagcagattttctgcttacatatcaggctcatattctcattagtttcttgtattattttcactgttaatgaggattgtttctaggacaattttgctttaaaatgaatgttattcaatttgagttagggcagaaaggcaaaaacttgtaggcaaattgttgctagaattatggtccccagagcagtggttctgatcacaggtcagatgctgggattattgtccaggtttgcttagaattggcaaagacaggttagatcctgttttctgtcccttcctgcccaactctttttaatttcagttcctttctgaattattaatatgtaaccaaagtattactgattcagatattggtgtgctttgctttaagaaaatccagacttaaagtgaaaaccttgcataagaggtttttaattttcagaaaacttaagtcgacagctttatcatgtacataaaatataactcaaataaaattgacccaactttgaggaaaacactgattttaagagcaaggcattaataaggatcacccagacttccatagccccagcctcccctttcttctctcccatagtatctactaccacctgcgcttttttctcttctgtcagaatccagcatgttctgatatgctgggtaagatcagatcttacaaatgtcttcatactggtttctggttatggtatgttctatcattacttaatttataactagaaaaaaggccattggccaaagaaaagaatttcccattgcagaattttaggcataacccagccattaggcaagctgattttcattttatatttgttaggtagtgaagagtcacataggattcttctctgccagtcccatatatccactctctaatctcaggaatagcctgctttccttccctttgttctgggaaagctgcaaagtgagcagaaatttcagtggtggagatggggaggttgacagaaatcatttagttatttggcctgtgttgcccatttctggtgggcagtttgttaatgatgggtaggtgtgaaaagaggcatctgttgccttttatagagaacctcttggttttgcagcacctgaagctcatgaactggaggctaatgaggatattgtgccaacgctgcaggagaatgatggtagactcaagattcgctgttgggttgatggtggagagctgttcattttgatgtggcctgtgtgccacagcgaagtcctgtcagtgttctaccttctttctttatttcttcctccattcatcaagtatttactgaggacctgccaggtgccaggccctgtgcctgatcctggcagtaaagaggaaaatgatcctttgagtagcacagcccaatagagaaaatgtgaaaatcagtaacattgctgtggagtgacaagttctgcaatggaagtatttatacaatatcatagtatgactagctgtcctgagcagagcagtgtggctgaagagggaagaatgagaaaggggagagggccaggtaagttttgagctggtgaatagacagttttcaggaaggacgttttagaaagaatagcgtgtgcagaagacactgcttagggatccaggtggggaagtatcattaggtgagatggagaagctagaaagaataaaattgtgaaggatcttgtaaatcttggaaatgaatttagactttacacataggccttcgggaaccattaaagtgcttttggacagggatgtaacatgatagcatttgtgttttagaaagatcattctggtggcattgtggagaatgcactagaagtctaggagaacagaaaccaatgaagagtcaattctagacaaatgaaaagatagaagcaatgggatgtactgacaggttcaaaggagaggatgatggagacggggccgtctaggaagactcccaggcttaaaacacaagtgcctgagaagaacatgaaaaaaaatagcaataacaataataatagttgtaaatctttttttttctttttttttttttttttggagatacagtttcattcttgtcacccaggctggagtgcagtggtgtgatctcagctcactgcaacctccgcctcctaggttcaagcaattctcctgcctcagccttccgagtagctgggattacaggcacacagcaccatgcccagataatttttgtatttttactagagaaatggtttcacctgttggctgggctcatcttgaactcctgacctcaagtgatctgaccaccttggcctcccagattgctgggattacagacgtgagccactgcgcccggcctaattactggactcttgtcaggcgcaaggggtttggctacatgctttatataggttatctcattcagtaatcgtaataatattagtaatattattatcctcactgcaggcaggaaaacaagaaaatttgaaagttaagtaacatgcccaaagtcacatggcttgtaaatggtagtgcttacattggaagccaggtactccaagctctaaacctatgctccgcaggaaattcagcaggagaagtcaaggcaaagtatcttaagttcaattttagactactgaatttaaaatgcctatattttacgaaggtcaaaatatctagcagggagttggacagctggattggaactggtgtgtggtggacgtgtgatctgggattagtgaattggtggtagtgaagaaggtaagtgtcatgtgagcacatccctagagacccggaatggaactgggaagaaccacatccaacgggcaagcatgttaagacaaatttgggaagatgatgaaaaggagcagctagggaggtgggaagaactaggggagtcacaggtgcagtttgaagatctgatggaatgaccactgagattaaatgcctcaaggagatgaaggaagatttaaaatgaggattgccttggatttggcaattaggtggttgatgcatagtcattaaagttaggctagagtgggctacaaatgtaatgaaaagtgagaaaatggagaatatggactcaggcttcttttcaaagaagcctggctgagaaaggaagtgggagagagagaaagcagaggcagcctcaaggtcaggggaatggctgtttgtttataatgatagtgacttgaaatgcttggatattgaggagaaagagcctggagcagtgggaattacaccaggatgtttatcccactagatagggaagtaggaatccctctagccatcaggaggagaacatggattcttagagaaaaaacaggtttctacagttttaatttagcagcccccttgtattgcataaaatcagtccagattggtgaagtgacttgtctctggccacctagctagccagtctgtgaccccagatctcctggttcctggcctctttcctctcttgctgccagtgtcggtgggagaagaatcatccctgatttgttcctcatggtgtgagtctccactgctcctgtcaggcccttccttgctccttcagaatgcacatttcacagattctgatgtgtcagcagggcttcagctgtgtggaaggtgagtcacagagctgcttcatttcctccacatgccatggggcagagttttagacggttaattataaagtgtcagtaacataacagtgctagaagcctcttcctctaacctgggaacccacattcctagaaggaggaagggtctcagagttggggcctttcagcaatctcctcatggcccacagcgagagaggatgtatttatttgttcagatgtgacacctgcacacagaagctgcatgcatgtggtggagggtggggtagcagtaccgattccttaaatgaaaaagcctctgctccttgaaaacaccacatcagccaagagttacttggtgagcctggaggcaaggagcacccatgcttttcagaagggcccagagtagcctgccccagctctacttcggggtctcctggaatctgtatatatagtgatgattaataatctagtcttcttaccacacatggaaggtgaaagaaggcctgcaattcagtggagatgaccttcttatattccaaagcttgtggtgtcagccaagctgtcataccattctgattaaatactgacggtgatcattaagatctaaagccctgcccagaacacactgcttagaatctaggcacatgaatgctatataaacctaaacctcccttttataattgatcttcaattacaaccctccttgtcttgataggctccaaggtatagcaatcaagttgcttctctttgccctctctcaacttacctaaacccactgctccttttttgtttagtctcttggggctttcatgacccatagttggtaaatggataattcctgtgacaccaggtgccatcattctcattgactacagtaagagcagtgcccctgaaatgtcatagactacagagtgaatggtgctctttgtgccacaggtctagttccaccccctcttcttcctttagttacagcattctcagcagaaaaagtccatgctcttgggaagtggaagccccaggggcccatcccccctgggtctgctgccctctcttgtttgtttagtggtactaaatcaatctaaattaaactggagtccaaaatgctaaccttgcgctaagagattcagcggggatgtggtgattcaggacacatggttcattcttctgcttattcctttattcacagttgatttacagttgtcttaggaattgacaactgtgagatatacttgacctaagggactgaaaaaaaaaatcttccctattttctaaaaaattagggggacttaactagcccaaggatgggaggcagaaagggccaccatagagggaaaggaggagcgaggcttggtaggtggcatgacatgacatattccagggctgaaaacagagacagagtgttagaagcacaagagggatagaggcccaaggtgagacaggactccttgtgagagggggcaggactcagaacctgaaaaaccttgaaggccacatttaaaagatttgggctccatcccaggagtaatagaaggttactggaggattatgagatgccatgattaggtttatattctgaaaagatcattcttgttgtatctagaaaactaatgggaaacaaacaggcagacagagaggtgggtaaaccgtcagaagaatgtggtatgaggaaaagcaaggaaaggcagtgttttgaaaagctgtgaactgtcaactgcttctaaagctactgagcagtcaaatgaaataggactggaaaatgtccgttgcctttaggtacttgtaggtcatcagtctctactgacagaggaactagaacacagaaagtagaagaatgagcaggaggtgaggaaattatagcagtagagcaaagtttctttcagtgccagtgaagagcagtgaagacccaggtgatagcttgagtgggatcagggctacaggaggtattttccttttgtgtgtgtgatgagggagacatggacaaatttcagcgctgatggacagtacttaaatggttaagagttacagaaaataccagaaagagagaaatataatcaacgtctttttattccagaaaagagtgaagggattggatttaaagcaatccaattgctttaaattggggctgggcacagtggctcacgcctgtaatcccagcatttagggaggccgaggtggacagatcacttgaggtcaggagtttgagaccagcctggccaacatgatgaaaccccacctcttctaaaagtataaaaattagctggacgtggtggtgcacgcctgtaataccagctactttggaggctgaggcaggagaattgcttgaacctgggaggtggagattgcagtgagccaaggttgcaccactgcactccaccctgggcaacagagcaagacactgtcaaaaaaaaaaaataagcacatgggaaagagttgatgtatttggcaatgggaaaggagaaaactgaggaagctcccatgttacagctttcatattctatgtgaagtagctgtggggcaggagggaggaatgtaagtagcagagtgtggagacatagcagatcagggccttgaggaaagtgggaaatttacatttatggatttggggagtggtctaatttaattgagaaacataggatctccatggagtttttgatgctatttgtagttgatgacaaagaattctgttacattactagcgagttgtcctagagtgtgcttgtctcaactagtgctcagctgctctggagaaggtgcagaaggtgagtggcagagttcatccaaggttacgactttgcaagaaaagctgacaaggacacagaggatggggcagtcaggagcacaggcagaataatggacatgattgaccattgacaacctaagatggataaagaggtatgtcaagatcagagaagactgactagcagaaaagaacagttagtgggctgaaggtcctgatgagaaagtagagcagtatgagcaagctggaagaataagaggttagcatcagagcacacaatgcattgctttatgattttgaggctgaagtctccatatggaaccatgggctgaggctagtaaagtcttcgtaaagctagaggaaatgactgggaaactatcaggtaaaagagaggaggaagggcaggacttcgaccaaagactttttgtaagatcatggaggccaaaggtctggaagagtcatcgggaaactaaaaggaaccaactccacattcagatcctgaggcaggtggagtaggagagtctaagcagatactctttgtatagtggcatcttgggatgagagctagaggatagctttcaaatcaacatggtatctctctgggttctttgggctagcgataaagtaggtctaccccatttctacattctaatttcctttgaactatctagttttcagggagacaaagactatataccactttctctatctgggattcattaatttcaaatttggctactatgctataaccataacaagaacttgtggccagatatgatggctcatggctgtaatcccaacacattgggaggcccaggtgagagaatcacttgaagccagaaatttgagaccagcctaggcgacatagtgagacctcacctctactaaaaatacaaaataaattttcttttaaagtttaaaaatttgcattaaccttccctataaattcccctgcctaaagaactctccttcaatatttcttttagtttgcatctggaacaacaaatctgagtttttatttgtctaaaacatccttattttgccttcatttttgaagaatatttttacaggttgtagaattctaggctggaaatttattttctttcagcaacttaaaaatgtcattctatggtctgctggcttccattgtttctactgataagtcagctgtccatatttttcttgctttttggaaggtaatgtatcttagtgtgtaatattttttaaaattttccttgtttcagcatttttactatgatgtgtctaactttatttccttgtatttagaacttcttagaatttcttgaatgtgtggcttataatcatatcagttttgaaaatgtgtgcagccattatcttgtcaaatattgctttagtccatttctctctctgcagtctcagggactccagtatgttaattctttcacaaaattctgtgtctcttactctcttgtctgtttctttcaaactttttgctctccatatttctgtctgataatttctatttgtttgtcttcttactcactaatcttctctttacctctgacaaatatgttgctaaacacatctattaagaagatgtgttatttattgtgcttttttgttgttgattttttttttttttttgagatggagtctcgctttgtcgcctaggctggagttcagtggtgcagtcttggctcactgcaacctctgcctcccaggttcaagtaattctcctgcctcagcctcctgagtagctgggattagaggtgtgcaccaccatgcctggctaattgttgtatttttagtagagacagggtttcaccatgttggtcaggctggtctcaaactcctgacctcatgatccccccgcctcggcctcccaaagtattacaggcgtgagccaccatgcccagccttgttgttgaatttttattaaattcttttttatagattccagttttctggtgaaattctccatgttgtcatctttttttcttgcacaaaaaaagcacagttattttcaaaacatatgtttggtaactctaatatctgggttacctgtgggcctatttctattgtggttttttctctctctcttagctgcagtttttggaatttctgataatttctacttgaatgttgggcaatgtatgtaaataattgtagtctctggatgatgttatctttttctaaagaagtgtaatcttatcttttctggcaagcagctagagtgggagattatatccattcagtctgggacttagcttattggattggattggaacttttgtaaaacatggtttacctcacatttttctcctcttctagagtgtagcttgtcagaggcccaaatgatagcctttggttatttactggaactcttccttcttggtgggacctaaacttgtgactgccagaaatttgacttttctttatagctatactctcatttttatagagccttaagctgtatgaaattagcaaatataaaattataaaaatataacaatatataatataaatataacaatatattatgtataataatataagtataaatattatataaaatcatcaagtctccataaggtaaaatcaaatgctgagtatgggactaagctccatgtacctcccttctcccaagtatcctgtcactcacgccctggttgttctggcagctctgaactcccattaagagctttcctcatcatatttagtatttaacattaggaatgtatgggagaagttcatataaaataccaaaaactgaataaacatagctagtcaggcatcctggctctctgactgtgtcacaaacaggaatgacttcatgtaggaatgttctttaccctaagcttgcgtgtgaggaagatggtttcctcttttttggaggcctgtacatctgtgaaggtgtgccttatcctctaagaatgcccctgtcattgtttggatggtatacataaacagtttagcaaatagttgtacaagatgaaggaatgaacattgctttttttttttccacctttttgccagacaagacgtaaccagaatagacatgatgatattcgttaaaatttactaaagatttactgcggagcaggctctgtgttagatgcctcatactgattatctcatttaatcctaaacagagcctatgaagtaataaagataattattcccattttacatttgatgaaactgaggcttaaagagataaagtcaatttaaacagggcccaagagccaggaagtaaatggcacaagcaagtttgaactcagatttttctaatctcaagatccatgtttttttccaacatttcatcctgctacttggcctgccctttttcagcataactagtatcatgatttcactgacccctggactcctgatatatcttcttatgtaaagtcagagctaagtagtctgaggggtttacatgcaaagacatccccttcctggtacattgctttcaggtatttccagattcttccctcccccacccagcttttgcaatatgtatcacattaaatgcctccatttataactactatggcaagtctgaatgtaatttttttttttttttttttcagaaatacagctttatgcagagacaggaagcagttagtggtagggctttattttgggaggattagagtggtagggggtggggcatggggagaaattgctttctgcagtgtcagatgaatgagttataggaaatgatagctcagccagcagcttggtgcttgctagtgagtcagcagtgattccatcctcagccccagtgctgggatcacagctgagagacactcttcctggtgagggctcctccccgccctgctgtctgggacatggatgttctgcttacctgatgtgaaccattcagttacctgtcatggaggagaaagagacacagaacgatctttttgttttaatgcagatgtttctacacttctttgggattaattggtatttctaattatttttcctgatatccagcagaaagattcggtgattttctatctagaggatgatatttgggactggtgtcaaagcaggatctagttcttaaggcaacattttatacttttatactacttcaactttagaaggtctttgtaagtgatcagaatagtatggaaaagcaagacaagaagacactgcttcagaagaagaggtaaacacgaaaccatcttgtcagcacaatggaaaccatgtagctgtagtaaaaaactagaaccaaatcattgcggttgttgaggtaggatagtaggattgttggtgattgcttttttgttttgttttgttatgttactttattttccaggtccaatacataggaacaagttgtaaaatttattctataagtagtcctttagtgctctaaagtaactagttgtgaaaaataactggccaaataaccttaatattttaggatatcttttccccaggcccttatgagactcttaaagtcaatctggtcatacccaggattctccagtaggaaatgggtagagaggtctaacttttctcagaatttcctatgtgccaggcatttgcttccttttcgctctgagaaggtgctattatccatattttacagataaagaaactaatgctcaaagagattgaaggaacgttcccaggccaatttgctaatatgtggtataatttcatccatgcccaagtcatactgactccaaagtccatactcttttaactttagtacaaaatgatgccagcacagtttccattccacctgctttttgtaaggcagtttaaatatgtgaacttactgctggactgatcatccacgaaaaaaactgctgcaatatattattctctttttgaaaaactgggactctaaaactcacatatacttgacttgtactttagttagacacatatttagagcattggatagcatgcatatctgtgtgcttcacctgaagtccataaaaaaggtacagtaaacacctggtttagtggttggactcccctggaatttgcagtgactctcatgatctctcctaaagttcttagatatgtaagactgaggataaagctaaatgttttgttgttcagaacagtagctgcaagtgacagttttggttgaggggggggtgttattgttgcaaagtagaacacttacagcttcacaaaaatatccatctcattgacccaacagggccctaattcatctttttaataagctaataacatttaaagatcttttaaattttttactgttactataatgcaattaatgctgtgttttgatagctttattgaggtattgatatgtaataaactgcacatatttaatgtacaatttgattaaatttaacacctatgaagcatcacttcaataaaaatgatgaatatatccatttccccaaaaagttttttgtaatgctctatatttgaaggacaaaaatccagtcatttatgttctcctttccatttggtgaaaagagcctggacagggacccagattatgtgagtctggactccaatcttgccttaactagctccacacaattcagtgagtcctttaatttttttggcccttggattttcatctgaaaaatgagggggttggactagatggtccctaaggacccccacagctctgaagttcaataaagctaaaaggaccggtgtacttagggtattggtttgtgtccaaatggttttatgtaaaaacgtagacttccctggtggcctggtgtcagctgtgccacttcatccctgccttgctttgcttgattggttatcatgaaatcattgtatttcttttaattccctttcaccctgattcagggtcattcgtgtcattgtctccacgttggtcgtagtaagcatagggaaatactcgacttaagaatttggggctaatacttgggtaatgctgggaatttggcaacaccataagcaaagagctaaggagagattatgacaggatcatcagccctctggctatttttgaggcagcttgagcgttttatgcggggcagagacaagctgtattagatatatttcaggactgggggaagggaagaggattggaatttaattaaaattcttatcccaactttgcccatcttcttgccaagtcagcagctagcatttctgctcatggttctggtggctctgctgtgatgacatacaattacctccaaaattctcgtgaatttgctgaaaacttcaataatgctcaaccagatgctttaatcaggcctggcatgttgccatcttttgcctgtgtttttggcgatacctgatctaccactgccagcattcctggtgggagaggggctttggagggagctgatggtgaaaactgagctgattacaaacaagaaaaccgcttcattgcagcatagagatctttccaaactgcttctgttttccaggtagctcagtggcatttctgagcaggggccaccctgacttcaccttggcccaccatgagggtcttcctgctttgtgcctacatactgctgctgatggtttcccagttgagggcagtcagctttcctgaagatgatgaaccccttaatactgtcgactatcactgtaagtcgtctcaagaacagtcttctattctgagaaggaagcttttctgtttttcattctgtaagcatgttcattttcagaaagaggcagagattttttatgtcttaaccttgaatttgcatctgagtttatcagtaatcatttcctagtgtttggagaaaacggggcagttttgttgggtgcttttctacagcaacctgtatataggttatatattttgagttaaaaagaccatttgctgacattcactgccttttattcatttatattcaagaccttaagagaggaatttagttaaaacccttctacaacaagtatatacagctaatcaatgctgtttattgatccctcagctccataatcctgaatgatggtttagcccatttttacttgcagattcaaggcaatatccggtttttagaggacgcccttcaggcaatgaatcgcagcacaggctggactttcagctgatgttgaaaattcgagacacactttatattgctggcaggtaattttcctctcattggtttattagattaaaattcttttctcttgtggtgcttgcattagtgtgtctagttcatgaaaaactaatatgtgattgtgatcaaaaattgcaagtagccagaaatattcactgagaagagtcagtgttgtgtaccgggaacaaaatacagagctcaagctttcagcggtgctattttattactgccatcaagaaatcatacaccattcttttttcctaaagcagcaggggaaaaaaaaaaacctttctttatgcgtttttaacttagaattattcaagcaaatattagaaatatgtctatgctaataccaagtagcagtttgacccatgcctggagagaagagctttctttgctctctgactacagtgatatataaaagcatctcactaatgaaaaagtactctttgttgactttgtttgagacagagaaaatccagatgatctctaaaacacaataaaggcagatctgtaaaaataaaaaaggaagcagcttaacatttttatgtattcacgtgatatgttttattgccttatttccaacagggatcaagtttatacagtaaacttaaatgaaatgcccaaaacagaagtaatacccaacaaggtgagcaactgtagttggcaaatttatttaccttccctctgaacctgattaattttcccactgcctccccaaaaatgttcgcagttaaaaactgctttggttttgcttgattaatacagaaactgacatggcgatcaagacaacaggatcgagaaaactgtgctatgaaaggcaagcataaagtgagtgaaacagaaaaatgtctgctagatttagtctttctgtgggcttgataccacagtgccagcatgttcaaatgtctaatattaatgtaactactactttctttaggatgaatgccacaactttatcaaagtatttgttccaagaaacgatgagatggtttttgtttgtggtaccaatgcattcaatcccatgtgtagatactacagggtaagtatattttatgtgatatgcttcttttgatcaacttttctcccttcactgatatgctgttagagttgaaatctttctgctttccagtaatttgttttatctctagtgcaatgaaagaataaagacagaattcttcaaatggaattttaatacaaataaaatagtattgccttcaaacgggcacgttgaatagatatgacactggctatttacttttcttttgtagttgagtaccttagaatatgatggggaagaaattagtggcctggcaagatgcccatttgatgccagacaaaccaatgttgccctctttgctggtaagatcctttagcgtaatgaatataaatgattaatgacattgaaggtgaaaaaggaatttaatggaagagtaaaagttaataacttggatacccaccttgatctaagtgttcgaaaggctagaatctatgcacaaatttccaaaaaaagaagaaattaagggcaaggatatttcagtgcacactataagtattatgacaccgtgttgttaactaggccagtggcccccgataagttgcttaagtttttgatgcctagatccctgtaaaattagataatatcatggctgacctgtcacatgttgatggtgagaatcaggtgtagccctatttgtatagataatggtaataccagtgagagcgctccaaagggcataacacgctgccaaagctaacacactgcaggataattatggttatcttaccaaaattatacctttggtttcagatgggaagctgtattctgccacagtggctgacttcttggccagcgatgccgttatttatcgaagcatgggtgatggatctgcccttcgcacaataaaatatgattccaaatggataaaaggtacctttgaagagcagtgtcgtggggtcaccaggatagtggatggcccaagtggggacagcagccacggccatcaagaggttcagcgcatgactttatattgtttatttagaacaagtacacactgctttgattgtgaacaggagcattgacagggaatgaggaggctggtagccatgtcagaagagtaagttcatccaggtgtttatcctaggtgacctcaaaaaaaaaaggggagatttcatctctgtgtgtgccaatttgtctaactttctaaatgcacataatactacttgccatctacccatcttggaaagttaccagagagaatcgattagtccgtatgagagccattttgttcttcagagtctagaaatcaagattttttattttcagtgtaagaggttttcttccctagttaaataggttaatgaataaatctgttgaaacaaagacctttgctgtagttcagttccctgtaggtctttttacagtccattagctgactttagagatgactggttccctgaagcttgaacacacccatattgggactcctcaaagtcattggcagattggagttcttgttggcttgaatgtaattgtgcaacatctgtcagtcatgctttgcagtcggggtcttatgctaattgaattatcctttaggaaccagtttgtttttaatttttctttcagagccacactttcttcatgccatagaatatggaaactatgtctatttcttctttcgagaaatcgctgtcgaacataataatttaggcaaggcaagtatatgcatttggcttgaattgtggacttgtactgcatgaaattgagaccactgtgatagagttaaggatgctcacttggcatgttttccagctctcaattcagtatacatagggccaactgcagagaggtgggttgcttatcatgagaataattgctggaaaacatctgaacaataacctgagtgggaacagcagccttgagttttgagaaggtatcgttttttttcctgcagccacagagagtgttctacaggtacccttgagctacggatgctttttttactctttagaaaaccactgatagtctattctttctcagcgtcaaaagacaggatagaaagtagcgaccccattcaatttttagtgtttcagtgaaagcccatgtgattttaaagtattgcaaccccttctatgccaagttgaaagatgacatgtttcattaacaatacaggaagcaaagttggagaccaagtgcagggatggttttcattcagcaaggcagatagacagctcacttcttgggaaggatgcttagcaaaataggaaagtggctcttttttccccacaggtgaatctagtttaccttcttactgaacagatccctagagagaagactgctagatttttttgaaccagatgtatctttagtattttttgtccctcccttaaacagtatcattttgtttccattcctttccatgctcataaccccattgctttgcttctatccgttgggcaggctgtgtattcccgcgtggcccgcatatgtaaaaacgacatgggtggttcccagcgggtcctggagaaacactggacttcatttctaaaggctcggctgaactgttctgtccctggagattcgtttttctactttgatgttctgcagtctattacagacataatacaaatcaatggcatccccactgtggtcggggtgtttaccacgcagctcaataggtgagagcagaaccccggcactgcaaagatattctctgcatgcctgtcagaaccaagacaggcttcatgtcgccagcctcttcctgatgattttcttccttttcagcatccctggttctgctgtctgtgcatttagcatggatgacattgaaaaagtattcaaaggacggtttaaggaacagaaaactccagattctgtttggacagcagttcccgaagacaaagtgccaaagccaaggtaaataaaaaagtagaaaagggttttgtcttgaacaaaaccttccggtcattggaagcatccctcctcagggagcagcttggccaacctcccacaccaggaaggggtccctctctcagacagagccagcagacatagccttgtgacctgcaagcccatgagtgtgaatggagaacccattgaattcaggggcatagcattgctcctttagtttcactcactctccttcctcacttgacctcttctctgagaatatacacttattccttagatacagtacatggtgtggcaggggcagccgagagcataaaataacgctgttttcctttcaggcctggctgttgtgcaaaacacggccttgccgaagcttataaaacctccatcgatttcccggatgaaactctgtcattcatcaaatctcatcccctgatggactctgccgttccacccattgccgatgagccctggttcacaaagactcgggtcaggtgagattgtgtgtgaaacactccttcctattcaacgttttctctgcccgttggcctccccttctgatctgtgccgcctcctcttgtaggtacagactgacggccatctcagtggaccattcagccggaccctaccagaactacacagtcatctttgttggctctgaagctggcatggtacttaaagttctggcaaagaccagtcctttctctttgaacgacagcgtattactggaagagattgaagcctacaaccatgcaaagtaggtatatgttacgagaacgcccttcagcactgctcaaaaattttcggcatgtatttcatctagtcatgtccttttggtcctctaaattagcagtggtttggcataatagtgttttgtgttttttttctcattgaaataaatcttgggtttgtttttttcccgagcctgctagggcgaggggggtgaatggttgatgagtttaaaaataatgcagcccttgtttttcacctgtagaatatgagaacattttaacagcacctctcttatcttgcagatatattccaagatgctacatgcagcagacagctgtgagcttgcatacacacacacacaaatatacatgcacatacatacacagaatgcagtactagttaagtatttccttcctatctttaataagtaagagaatatttagaccattaaaaaaaaaaacaaataagaaatagaagagagaaatggagccaaggggactaaggagagaaccagaaccatctaacacaggaaaatttatatgcattaaagcacgatcctttttatttctatagtcaaatgtggccttcgcaaatgcaattcacttctatcatcataacaggaaagcaatgtttaaaaaccctttgtccagcctgaaatttaaccaaccatgcagagaagtagaagatgaatcacataattattatttcccaagctatgtacttgcctggtttgttaccaagaatattccttatgatttcccaggtctcagtaattgctaaagcaaaccacacttgactgactaaacatatggcttcaaaatgtatcccacaaaataggtgcagtgctgagaatgaggaagacaaaaaggtcatctcattacagttggataaagatcaccacgctttatatgtggcgttctctagctgcattatccgcatccccctcagtcgctgtgagcgttatggatcatgtaaaaagtaagctcgtgtttctttacttaccctgggtcttgcagtatcgaaacctttgttgatgagaaaatccaagttacattctgtttggttttacacaggtcttgtattgcatctcgtgacccgtattgtggctggttaagccagggatcctgtggtagagtgaccccagggatgctgtaagtatactttgtcacatgagctaggatgaactatcctctccagggtctctaaagctagaaattgcagaaaacttccaattatactacttttctttttttttgttgttatgggagaaacaggaaaacgaaaaccaggagacgtgacaaggaagggaataataatacttaagggaaatggtagacctaataatacttaagggaaatggatggagagaaaaaaccaattctcttctgttctcttaagcattctagttcaccagtttttaacagaaatagtcattttagcaagttatgttaaaatgttgttttttttttttctctctctgcccattcttactaatcagtctgtgttcttggttctgctctggttgtcacttgtgttcctatgaaggctgttaaccgaagacttctttgctttccataaccacagtgctgaaggatatgaacaagacacagaattcggcaacacagctcatctaggggactgccatggtaagacagaatcttccattcccacctggagcttctttttgaccacatttgcacgtcgacattattttacaatcagtctttttaatgactcaggacacataccacctagcatttaacttaaacttcgcaaaagctgagctgttcggtcatggggatacattagaaaagaggcttactttttttttccttcaccatttacaattttgtaggaaatctagagagaggtagtctaaccagtaggttaatatttttaatttatagtcttttttttttttacttttttagttaattggaattcataaatttttgctttcttttggttacttttcactgattacttgttcctttaattcttttagaaattttgcctacttcaactacaccagattacaaaatatttggcggtccaacatctggttagttttttttaatttttttgaattaacaaccttttctttccttcagttcagcattttcagccccttctcccctccttttgcgcagtttggcagcccttcatttttccgctttgactcatattcccactgatggtaccaaaagacttttcttactgagcacttcacccttgtttatagcatgttaacacttcatcattgaccaagccacatcctttaagaaaattcaaatgggctaacatagactgcattccagctgcacgcacgcccacccaagctttcttctttctcacctctttgcattgtgaatgtttcttctggtcatctgtatttaatggatggcggaatttcattattttccccatctctcctcacctttcctatgacctagtaaacaaatacacatttcccataaatgtgtatttataagttttagagatctttgaatggtttgcgctaatcctgggaatctttgaatgttgtggtctcagtggtgtgaaaaaggcttcagtggagtgaagctgatttttgatgtattaagatgttcaatgggctctccaagcctctctgtacctgtttggagcctccttctgttaactgttgcaccagtcagaattgtggtctctgaggttttagcttaaaagcgtaggcttacattttgagggaaaatctatttggaggaaatcagtactagacatgctaaaaggttaagttaactcccggtcctattgctgcttctaaaactcaccagcaattcctttcctcagggggagaaaaagatggtagatcttatgtatcagaatatcctcattcagtttgtaaatgccattgcctttgcattaggttctgcttggaagaaactccccagcagttttggagagagtacaagcaaagtctgtcccctccttcgttgttttactgtgggtggcagagccttagtatagtgaataatctacaaatggacaggagcccctggtaacaacctcttaggcagagctggtttgtcacgtccaaaatcaagtattttcatagacttaaccagatattttccaacaaagttccatcatagcttcttccccagtaaagcctatagattttctaaccatctgtgaaagtgcttttaaaaatgcataaaaaagaaatgaaatgatgtctcacaagagaaggaagaaacagcaactaatctgccctgggaattatattacctttttcatgagtgtcattagtaaccacaggggctttcctaagagcctttcgagtatctttaattttgaaatctgctgaatatgtctttactgttaatttttagttttcattcttcccttgaaaggaaggaatttgatgtagcttcctcaggcgtgtttttacaaaatcctagagcaaactttctcataaaatttactcaaactttatttaaaaatgcaacagaccaatcaaaaaaaatcttgacactatccatattaataaaaatctgtttgccaccacagacatggaggtatcttcatcttctgttaccacaatggcaagtatcccagaaatcacacctaaagtgattgatacctggagacctaaactgacaagctctcggaaatttgtagttcaagatgatccaaacacttctgattttactgatcctttatcgggtatcccaaagggtaaggcctcagcagggacctcatctctaactgcgtggaaacctgatccttaatgtcactgaggagtatgtggttctccagaggtgggcctcacaggagcttctgcggttgtacctccaccgccccttgccacagtctctctggctttctgtggttatatctgagtgcattccttaaaagataaaagaggtggaaagctgttggagaaaaggctggtgaagcagccactcagacaatctaatctgtgttgatttctgtctgaagaagcagagagcctgctggatttcagggaatttcgagggtcaccgcagcaacatcaaaaaacaaaactcattaattgcaaatatcctgatatcagatgttttgtctaggagcctttcccagactcttgtttagcttcaattcaaaatgcaatctgaaaaggatatgtgagatgctaagttgcttgaatgccacaagcaataaaacataacagagtgctcgtccataactatcattttcagcccgtaataggagcagttataaaatagctgcctgttgagttagcttattaaatatattactctaggaaaaaaaaatctattctttagtacttactaaactatggtatcaggtttccaatcagtttttatggcagcacattgtcatttatgatttatatcggttgattttcattttatatgttttcgttgtaaccaattttataatcattcttctttctgctttgctttctttagtaacaccatttttttctacttttctttctcggtctttcacagtgccactgaattccataacattaattaaacattaattaaaaacaactaatgttcaaaggccttagtactaacttaaagcaacagaatcttcaaaatcactctgacttaccttactctgggatagctgtgtttatagcatgtaacagacttgaatacctcttaaactaacttttttttattaattgttagatgtctgtggttgcattaaaaggttaagtttaatttcagtaattataaactaatttgctcttctttttctaggtctaatttaaatattttcaaatatcttcagataatttgacagtttacttaactaatacatagtatgtttccttagactgtctgggtttcttacatagtcggtcattcaagagtgcttcaccccaagatggaatgaaaaaaaaaatccaagcaaacatgaaagtctctatttatagctaacagtgatcaagcagatatttttggtttgtgaacaaattatatgttcatattaaagttagtataattgtatcagagtaattattttagcatatgtttatgctaattattacattttcctatatcctagtagctaccttttaatcctgaattaagagaaaattatgagacaaaacatatgagtttaaagttagctatttagaaaatatacacttctaactattttttagatagaaactcttacatttttaacatgtaacaactatttatgagggattggaggaaaagaacagaagaatacagatcagtgggagattagagttatcctggcatttgcagcaatcctgtatgtctctggggatcctagtttgattaaagacaaaatatacaaggaattttggagtctacttgaccctccgagctaagcatatgaaccatatgaaggtcgtgttggctcactgaaagccatttgctatttattattatttttaaaaagcaccttattcacattgtcccatgtgtctatttcaggtgtacgatgggaagtccagtctggagagtccaaccagatggtccacatgaatgtcctcatcacctgtgtctttgctgcttttgttttgggggcattcattgcaggtgtggcagtatactgctatcgagacatgtttgttcggaaaaacagaaagatccataaagatgcagagtccgcccagtcatgcacagactccagtggaagttttgccaaactgaatggtctctttgacagccctgtcaaggaataccaacagaatattgattctcctaaactgtatagtaacctgctaaccagtcggaaagagctaccacccaatggagatactaaatccatggtaatggaccatcgagggcaacctccagagttggctgctcttcctactcctgagtctacacccgtgcttcaccagaagaccctgcaggccatgaagagccactcagaaaaggcccatggccatggagcttcaaggaaagaaacccctcagttttttccgtctagtccgccacctcattccccattaagtcatgggcatatccccagtgccattgttcttccaaatgctacccatgactacaacacgtctttctcaaactccaatgctcacaaagctgaaaagaagcttcaaaacattgatcaccctctcacaaagtcatccagtaagagagatcaccggcgttctgttgattccagaaataccctcaatgatctcctgaagcatctgaatgacccaaatagtaaccccaaagccatcatgggagacatccagatggcacaccagaacttaatgctggatcccatgggatcgatgtctgaggtcccacctaaagtccctaaccgggaggcatcgctatactcccctccttcaactctccccagaaatagcccaaccaagcgagtggatgtccccaccactcctggagtcccaatgacttctctggaaagacaaagaggttatcacaaaaattcctcccagaggcactctatatctgctatgcctaaaaacttaaactcaccaaatggtgttttgttatccagacagcctagtatgaaccgtggaggatatatgcccacccccactggggcgaaggtggactatattcagggaacaccagtgagtgttcatctgcagccttccctctccagacagagcagctacaccagtaatggcactcttcctaggacgggactaaagaggacgccgtccttaaaacctgacgtgccaccaaagccttcctttgttcctcaaaccccatctgtcagaccactgaacaaatacacatactaggcctcaagtgtgctattcccatgtggctttatcctgtccgtgttgttgagaggatgatgttgtaagggtaccttaaaacaagagactcgcttgtattttaagagaaccaagtggccaaagaaactctttctaactttggcaacatcagaacttgccacatgtagctactgcagcaaggcttctgtgtacttgcctgaaaacaaaggaaggtgctggtcattccatttcttttgtttgaagctaaagagatgtgtagctcacaggggctaccttaccagtataaagagctgataacagtactcagaagaatctgtgaacaaatacttgaaaatgggttcaatgtagactgccattatgtgtggtcttcccattaaatgtgaacattttaatatgtatgcattcaccttgcctcttgcacaaatgtcaaaaaaaagatggtaatatctcaaagaaatgaacttgtagattaccaagcagtttgctaaaaattcaatctttgacccaagctgtagcatttttttttcatgtgtggcatctttttcatgccaccaacaaacttgttgtgtgtgtgcgtgtgtgtgtgtgtgtgtgtgtgtgtgtgtgtgttctgtacccactaggatttgtttaggtgcccattgcatctttttgtgctatggagttgtttacattaagcatgaccgaacgagagacaatactatttcccacaggagtccattgggttcagctttgaaagaggaatagaatcgaggctcctttgaccatcaaaatgatgaactttacttatgtggtacccaatgccagaatgtaagagttgcaagtgattttgtgctgctattcattaaaacttgtattccagtcttgccagcttaaggagatcaagatattaagaggtatccttgatttattttccagtattcagtagtaaaattttcctgtccactgtgaatcaaagcctgagtcactctatttaaccttggacacactaataaggttttattttgattgtgttcgtttccccccccccaatagtaaaatttctcctcctttaactcctcctaccccccaaggtaagaaacaaaaaacaaacaaacaaacaaaaatagaagacaaaagaaagacatatgaaaggaattgtaattggcttaacagaaacagtctgtaaaaacctaacagtggtgcaatcatgttgtctgtgttgtgttatgtgagaattttctcctaagtcatgcaggtaatgacaatatactgtaaataccacatgtgagtttacctgaatctgtgcattttgtgccttattcatgagaatgatagaagtactaaaatctgtcaagtgttttcagtatagcacattatttactgagtgccagttgtaaatgtttttcaaccagcacctaaaaagactcttttcaaaaaatcacagaaacaacctaggacaattatttgttacataatccgacctcatagcagcattacattctttgccgtgataaacattccactcctgctttcctaaggatgaaacagtgataatgtgaactcaaatgaggtttcctgggtaatgtgacacctgcagaaactatagagcgtcatttatacgtagtttggcagaaaccacttacggctgatgatgcgcaaccctgctgactgtttcagttaatatgctgcacaccacacacttgtttagtgaaccaaatctagaaagtaccaaggcagaggtatgctcctgctgtaatcaggcaaatgagttcaactggatttcttttgacaatactgttggtacctattacttgggggaggacatgttgcagaagaccagatcatttttatacagaatgtgaaatactgatacagttattcttttttttaaagaacattgttttataaagaacgtgatttccagtgatctctggaagcgctaaagctaaaatttctgttcttgaaacacttcagctttgcaactaaaatattacagattaataataaattaaaccaaccaatgataaacactactcagtccaccaacaacaaacgtgtttgaattcaccttaccaatattaatcccagcgtgtgtaaaacagaacagtaactctatgtgaccccagataacattttgtaacattgtgcttccttgtagtttgtaatgtgagttcaatcagtatttatgttgaaatttctaacattaaatctagtctctatcctgttaatttaatttttaaatgctttatccatttgtgcaaaggtaaacgcagattgtatcttttttaatggtacggcataaaaagtaaccctcaagtgaagtgtctctatactgttttatagagtactttaacatgaatagataccttgtaaacttgtattgtggatgtgtaaataatatgtactttgggtttttaacaccgcatgtaaagtcaaaataaaatatacaaatcattata

SEQ ID NO: 401 - DNA, 122846 bp, Homo sapiens
gtattccagaccccattgcagaagcctccgcaactgctccaagaactttattttatacggactggcggcgagagcagctgcagttcgcatctcaggcagtacctagaggagctgccggtgcctcctcagaacatctcctgatcgctacccaggaccaggcaccaaggacagggagtcccaggcgcacaccccccattctgggtcccccaggcccagacccccactctgccacaggttgcatcttgacctggtcctcctgcagaagtggcccctgtggtcctgctctgagactcgtccctgggcgcccctgcagcccctttctatgactccatctggatttggctggctgtggggacgcggtccgaggggcggcctggctctcagcgtggtggcagccagctctctggccaccatggcaaatgctgagatctgaggggacaaggctctacagcctcagccaggggcactcaggtgagtcttggtactaattttgtcctatctcctgggcatgctgtctcaaagacagctggaggagactggagtgaactggatggagaggagtacagagtttgggaaacttcagacctagagcctggaggtgccttctccaggtgggaaggtccccgcctgctgggcccgcagatatctgccgggccctcatccaactgcctgggctggagagaatgtgagcctgcatttggggtgccagagggaagctattgccttggtggctactccacctgactcatgtcacagctcaagagcctactcagggtgcagatggctcaggtgacagctcctctccatggcttcgtgtgtgtgcatgtgtgtgtgtgcatgtgtgtgtgtgcatgtgtgtgtgtgtgcatgtgtgtgtgtgtgcatgtctgtgcgtgtgcatgtgccagtggtgggatatatgtggggagaggttatttctaaaatatctgtctctgtccagctttgggttatgatttagcttaactaagtacagttagaggaggaaaacatttaaaacctccttagtgattctctctttggagaagggccacactcatgtgatttttttccttggttttgatgagtttaaagtgaggtaatccaaagaaaagccataaaccctgcagagttagatgcgggtacccagagaaactgacttggtagcagcaaatgaggctcgtgctacccactcagaggaggaattaatggagtccttctgatctccagagaaggattgaagagccagggtcctgatatcagccctagagtgcattcgcgattgccttttacaaagggaacttcaaacagctttgtttctgagactggctaggtaggagggaggccttgggaacctggacacccccttacctggctgccaggcagagtcagaagatgctgggggatgctttttctcatcagactgccaccagctcccctgagtgaccttgttcataaagtcatgccacatgcattatctcacgggaggctcacagtgatcctgggtgaccagcagctacccaccttcccatcttagaggtcatgtacctgaggctgaatgaggtcaggtaattgagccaagttcccccaagaaaccaatacgcagaggagctaggatgggagcccttggcttctgtgttccctgcattcctgcagagagccaggcctgcagggcgcagatggccccagggcacagggctgcagggcacagatggctgagggcttttccagctctaaaatgcagaatctagaagcagatccctggctctgaacctgcccttctaagtgccttgggtgaaattgtctggaagtaaatcatgattgccaagaggttagtggagagggtgacacctccctgttagagcaagacctccctctttgagttgcaagttgaggtccagtctccttgggcttcatccacaggtcactgtggcttccacatctcgcccatgtgcttcaagctctcagagccctgcctcagtcccaggatccccacctgctggagtacactggctggcagtctgaggtgggattctcttctctgcctgatctggggcccagaaagtggtcaccaaaggggctgacatgcaattcccaaacaaagcaaccctgcagctgagccagtgccctgtgtaggaaaactgtgcccggggcctcttcccgctctgatatccattccttcctttgcctctttggtctgggatggcttatgtttaaaatgggagggacggaatgcaaatgccatcagcctacccccaacacagtgctcctgggaggagcacttgccatcagtttcatcttctagagcacagacttggtccaaagacagtaagatccatgatctgagggtcccaatgcctgcttcctcccccaagaaagaaaaacagcccccaagaaaccttgggcagacagaacatgcgtaggtttcaattccaagtaacaaacatgagtagagttgtctgagcttttccaagccctgtgcactcacatctggccccgctcggccccagtccctctccccagcagatcccctgggctcctgctggaccagctgaggggtggggaggaggaaggagacagctgcccttcacacacattctggctaacaagccgtgcattccagccccgtcccaggagctgaccagaagaggaggaaggtggaaatggcagtggggcctcacacctccactccccaggggcagcgccctgtctggctctgtgtggcctctgggaagcagaggctattgcctttggcagagggagggttattgcaggcaaaagagacattggcctcctgcttcacagccccgcaaggagtgaagccagagggagggctgccgcacacagtgctcatgaaatgagggagggtcccttgcaacttagcagtgctggagctgcccgcggccccacctagaggccctgcctgggtggaggcattgggtggagggccggaattgggagcccagtgaactggacaccactgcagcacagggaagccagagtgggtggtgtctggggcagggaggagagatcctggcagagccgaggaccaccccctgttccatccctcccataggctggaggagaggcccgcagatactgggagccccaaggctgtgtgtgtgcacatgcgtgtgtgtgcccgttatgggggatgtacagaagggctaacagcagaggcgtccagccctcctgggtcattagaaggacatgtatacagtgactggtcagttctggtctcttctcagcccaaatgtcagaggtctgtggaggccaagctcaagtcatgaaaataggggcttcagctgggtgcagtggctcacacctgtaatctcagcactttgggaggctgaggccagtggagcgcttgactccaggagttccagaccagcctggccaacatggtgaaaccccatctctgcaaaaaattagctggacatggtggcttgtgcctgtaatcccagctactcaggaggatgagttgggaggatcacttgagcccgggaggcggaggttgcagtgagccaagactgcaccactgccatccagcctgggcaacagagtgagaccctgtctcaaaaaaaaaaaaaaaaaaaaaaaagaaagaaagaaacagaaaaaaaaaaagaagaaagaaaatacggaattcttgttttgctctgctgcagagcaaccccgccagccgccttccctgattatgtctatttatgaaagttgccacgcctccttgcccaccctccctctgaagagaaactgattgactgatctctcaatcaacaggcattgtccccccactgccacctgccagccctgcatcctctcctcccagcctcctctgggttgaagggttgagtttgctccatactgggcctgggacccatcctcatggggcttttatcttctaaaggatgctgttctttggttaaatgtccagatagttaaagagaatcagaagcaaaggtcaagataaactcatggctggaaccttgatgaaagtagagaataatttgtaaagtcactgagcatttatgtgacaaaaacaatatcaagaaattgatgtatatactttgtaatttggcttaaaaaacagattcttctcattacataaggaatgtaaatgcatcatagaaaacccagaaaatctgaaagcaaaaaggaatattaaatccccacaatcccttccagccagagtcctgtaatacatttctcacccggagccatcatagcgtcttacatccacacgcaccttacgcgtgcatgtcttacaaaatgggatcgtgttgtacacattgttgcgtcaacaggctgtttcctttcaaagagcataggattctcctaagtcaatgtatatgctcctggaccatcatggcgtagacccagagacccaatgagtcagcctctgggggccatgcagacagaagccctccctggcctaaagctgtccagatgcttagtgcctgggtgtcccttcagaggctccctgctcctcgggccccaccacagtagatgaatccctgctgtggtcctactgagccaagctccttccaacatgccagccccgttggatttgggagcagtcctggtctgctcagctttgtttgcaagtggactctgtaccccctctgaatgccccttcatatctagtttccttccttcatttccaacacagaacagaagctcaagtctctctggcatgccccgggcttctgagggctcagagcctgctctcaggttaccttttgagtcagcagggttccctcctcctggccccacccagtgtaacccacagtgaccccagctcaggattccagccccactgagagttgttgaaaggaatggacacatcccaccatcagaaaggcccaagggccttggtcttctgaagccctgaggaagctgggagtgggggcatcacggccccaaggacctggaggatggcacctgggtcctggtgatgagcagagggtcccggtgttcaggcttagggtcaggggtgggcaccttgttctatccatttgcttctgtttccacctacagttgattctctgtctctctcccggccttcgtcctccctctcctcccctcttgccttctctgcagctgttgcagggtgtgatggagaacaaagctatgtacctacacaccgtcagcgactgtgacaccagctccatctgtgaggattcctttgatggcaggagcctgtccaagctgaacctgtgtgaggatggtgagtgcagctggctcagacttggggcacaagatctggcctgggggtggggaaggagccctaccaccacccaaccttggcattgcctttaagtgcttgtgacctcctcatgtaatagtgcatatattgaactttatgctttaaaaggtcttctccatgggttttctcattcattcacttccacaaacctgtcagcaagatgagtactcattttacagatggacagatttcacagtccatcagtcttatggtggtccagcatggagcctcctgactccgagggccatgcttctgctcctgagagagtgagactcgggtcaggcaagggcctctgagccagtcagtgcagaccctctcaggtgaggagaggggcctcccacccacttcctgaagcactcgtgaggggcaaagagctctccaaggtgctcatcctgcccctgggtgcaaggccctggtcttgccacagaaaggggtccccaggccagtgacccagaaggccttgcatctcaggggctgcttatttgctaaaaccctggagatccaagtgatgcagcttcctttggaggagcccagagcgcttttccaccagcttggctcctgtgcacccagtagatgactgataagttcttgctgcatgcagcacatgtcagagaggagagcattgcccccacgtcaaagagaaatagaatgaagcttactgaggagccttgcaaagacttccggccaaggagagacaggccttttcctctcttgttttgctccactctgccaactgcctcttgaaattactcaagagcaatgactccactcttctcttcctccgaccctgcattcctcccacaaggcgctgagtgtagggaaagaaccgtggtggcttagagtggggagagtctctgcaggcagaggacacaaggagatttgggcttctgaccaatgaacctgctcacccagccctaggattgtccaccatggtggctcttcttctggattccaattgacaaacatattttgaggatccacgacgtgtcaggccagggtgagcagccagggattctccaaacacaaattaaaaaatctctgtcctcaaagggcttatgatcccagtagaagaggctggcatgggaacaactgcctataatatacagtaggccaaaatgtgtgtgaataataaagtcaggcgagcagagggctttctggaaaagggctggaagactgaaggagattgtctaagagaagatgtgggaaagatattcctatttgtgtgacaccaagctgggtcaggtttctgtaaggctcacaccagtcaggcggaggagaaggcctggggttctggtcccatgcagagctcccatcagtccatccgcaaaggggaaggtggcatccatatccactggcacatcagcaaaggggcttggtttggcaagaaagactgggtacagcacagtggggtgattggagaggactatcagggccagcctggggggcctcaggggtgggaggggtcagatgtccctgggaccaccatacccacttcctagtacctcatcttactctccctttttctgaaccccagattgtttttttaaaaagctcatttggaccagaacgactggaaattaacagcaaccctagccactgcgccttctgggcccctcctctgtggggagctctgtcagagggcactttgggagccatgctagccatgtcctgtcccagggttccctgatgctagggcccaggtgcagggcagacagcagaggttgagaggtgtggagtccaggctgattcgtgcctcctgggcctctgtgggcctcagtgtactcatctcaggctgactcgtgcctcctgggtatgtgaccctctgtgggcctcagtgtactcatctgccaaatggggatgcagggggttatctctgaggtcctatctggttctagaattctgtgtgtaaaattggacctggccattgaattaggagtgtggcccttttcaaccccaagttagaatatgatactatgctgggcaaagcatggctgtggctcccacttcagcaggagtgaaaactcgggtgctgacaatgtgcccaagaggtcctgtgcctctcccctctgtgctgccccaaccttggcagggaatctctgacttgctcacctgggtcttttgcccttagaagggtgcttccctggcatcccccagtgtgcattactgccccctcccacttggtccatgctctcacctcccccaggacttagctcagctcccaccttctgcgaggcctgagtttccatccccctttccctgactcttttttcctttcttccgtggtctgacttcctcatgacactgtagtctccttatttacatgtatcatttattatccattccctgaggcaagaatataggctggaccacagtaggcatctctgttttgcttattgatgtctcctgagcccagcatacagtaagtgctcactaggcattttttgaatgaatggatgaatgggtggatggatgaatgaagggaatagatggatggatgaatgaatggatagatggatgaatgaatggatggatgaatgggtgaatggatgaatgaataaatggatggatgaatgaatgagtaaatgaatgaatggatggatggatggatggatagctggatggatgaatagatggatagatgaaaggatggatgaatggatggatgaatgggtgaatggatggatgaatgaatgaatggatatgtgaatgaatgaataaatggatgaataatgaatggatagatggatagctggatggacggatgaatggatggatggatgcatggatggatgggtgaatggatggatgaatgaatggatgggtgaatgaatggatggatggatgcatggatggatggatgaatggatggatgaatgaatggatgggtgaatgaatggatgggtgaatgaatggatggatggatgaatgaatggatagatggatgaatgaatggatagatgaatgaataaataaatagatgaatgaatgaatggatggataaacagaggggtcctcgaagtctaaatgtggcaaagcattcaccatctacacctgattgccgaattctctgggtccatcttcattcctggctgccaggttgggggctggaatatggggaacccaggcagagtagagtgttgagatgaagccagtgacttcaaagcttgtgggcttccaatttgatttttcccccttttcctttcatttcagagaggaaaatgatgagcttgacttggggaaattcaagccagatttgatctgttttagaaaccctttagaagggttttgctgcatctttgatccttatctctgcggagtgaaatgggagaggaagaggaaagggtggggccaggcagggagggaggagggggaagttgggaagagatgggaaaggaagggagagccagcaccctgaatccggtcagggccgcccttgagcctttatttagtaaatgaagacggtgaagtgtgaggtccaggacaagctccaagtcccttacaggtcttcctccttcaatggagggcgagaggtgggaagaggggaggagagatggcacttcttgttggaggctggccatggggatagtgggatcaggggaggcaaagtcccaaaagtacagccctgacatgaaggtaagatgcagccttccctggtggtgggacctgctgagtcccgggtccggtcactggcaggctccccagtgttcctgctgggtgtgatgagctgccccactctcatggcccatgtgctgtggagtgcaggactcatcttcactgagaccggagaggtcaggactgtgttttgctcctctgggaattctttcgggaccttgtaggtggcagatgtcccagaagtctttgtgattgttggtaaatgatgtggtaagtccactcaagtcatcagtggtggagctggaaccggactctgagtctccttacctgagatgcaggctccttcccaggatggggatttcacggggttggactgatggtgccaaggagtgactcccctcacttctggatttggaaccaattgggaaatagacaaggaggcatgtgggaatccaagtgcagaatctgccttaagcctggaaaagctctgttcacgatgtggctgctggcacccccaacagacactcacccagccagcaagcgtgagtgcccctgtccaggcaccagccttcacctggttcacccacacacgccctcctgcccatccacctgagaaacagggacaagaaatgccaggttacagacagctcacccattggacaaggtagcacttcctgcaggcagaagtgctgaggagtccctcttttatgggcttgggcaggtggtcagtccagagatgaaaggagctccctgcagccaccaccagaggtgagagcaggaaaagcaagagaggaggtgaggggacacccttggggtatgggctgagtgggggctcgatgcccagggagcttcctcagcgcagaggaagggaccctcctctagcagagcagctcctgcaggcaccgttccactcctgcaccggacctgctgtttttttctctttccttctcgcccctcatttctcttcaccctccctgcctttatcccttccctttcttcacttgccaggtgagatgggaagaggagggactgttgggtgccttggttctctgtcccctccctgagcagccatcttgcccagctcctccagctcgtcctgtccctgcatccttcaaggccccgcaggtaccccttgctctctgatgcctttagagcctcccttctctgcatgcctgggcggggccacctctggaatctgcctcctcccttgcgtcttggccattgctgtcctcctcggggcccactgttgatggaaggccccatcctcctcacctcgtggatcctgggcaatagccgagcatcctcctgtggggctggaactgcttggaagggccaagcccaaataggacctggaaggttcctgagccaagctgcctctagcggcctctgatggatgctcactcacaccaccctctgaacagaaccccaggcaccggtgatctggcctccctcctcccgccccccaccccacccccaccttcctttctcccgccttggtttccccgatatgcagccggggcctctccagtctggcgccaggaggtggaggaggaggccgatctgggagtgggtggggactggctgggcctggttcctccacagcactttccgagggccagagagaggtgttagtgtcagaaaaatactgcagtcccattcgcccccacggccccagccccctccactcgtggcgtcatccatggccgcaaataggacctgggggtaatgagttacacatgctcctggcagctgccgacgcctgcagccgggccgctcgctgcctccaggcccggcctccccattcctgtgttccttccccataaaatgaaaatatcctcctcatctaccttcatatccgtcagatctccccggttcacttggcgcagctgagggctgctgggctgctgcccaaagatgggaatggatttcctgggaggggctggctggggcctctggaagagtcaccgccgtttacaggttgccgcatcaggctctggtgcaggagaggggactattaacccagttcagagctacagcccatgccaagcagagagcatggctctgttaggcaggtctgtggtccccgggggagccagtggccaggcgtgttccaggtctctcttgcccaatgggctgtccctctataagatgggagtggcttggtgacacgtgttgcagtgtgtcagggctggatgtgaaaccatggtgcacacacgagttgtgttgtccttgcatgcgtgaactcagacccagtgcagggggttctgtttgtcccgccatccccacgtgccgtacactgttctttactcaactcacgggggagccccggcaggaggtgggtgaggggagacagggaagctggagcacttactcctccggcttctgccctgtggagtcacccagggctgctcctgtccctccaccaaagaccacagctcctttaaagctgccctgtccacctgggcttttccccttccaggttctggcaactgctcccatccctgaccctttgggcccaagggtggttacagcccgcaaatgctgctctgtccttctgggtgtcacaccctggccacacctttgagacattccttttatgaaaccctgtgatgtgtcctaatctgagggagccttctgtttctgccagggccctgacctgctaatcttgagtgtccttgtctgcaaagtgagaataatgttactaaccccacaggcattgtgggaggattacatgatataacccgggtaaagcgccttgcacacagtagcccctcgatccacatttatttccctccctggtctttgggagtcccctgcaaagcttgcagaggtggggaagaaggagagggagagatgaggaggtagaaggagctgctgccacccagggactcccaggaaacacctatgccccttctcagggaccctggcctggagagtgttttcgggctgatcctggccttctgctgaagaaagcaacattctggttactagtgggattctcatgaggcctagatactccaggaaattgagcaagttcctttagtcctgtttctcgaatattagaaatactgggccctgagggctcctgattctatggcgtatgtgtgtctgtcccttcatcatcctaattggaggcactttgctcccaggggccccctgaggtttgctaccagaagagccaagggatgtgtttccttgtctcagggtagaggctgctgtttccaggaggcgttgggaagaggagggagggggtacagaggcaccaggggcgcctttccatgcagacgggcatggcctggagcatcccctctctgtcttcagccaaagccccagccctaggccatgccatctcctgtgtggcattactctagggatgggggcagtgaggagggtctgagggggatgccaccgacatgtcccactagcctggtacagtctggagtggatgggcttgaaggaggcccgcagtgaggacagagccctgggtgggcaggtgggcttctggtaatccctggagtagagggggtgatgagtggccagggcagttattccttatggcatcccccagttctcctcaccacagaccttgctgtcatagctcctggcctctgcttccttgcttgctcattcattcatttcttcatcttcatcttccagcaaaatatattcagggatcctgcaggtgctgtgtgcagcaaggggcacaaagaggtgtgaaatagggctccatgacttctgcaatttaccatcgctctagctggtctgtcctcccctctctcctccctcctactgcagaccagcacaaggctggctcaagtgcaaggttacctaaatgtgactcagtgggccagaaattcagggtgtgggcacgtcattggtgcagacccgcacacagcctcactcggctctgatacctgagtctaaagtgctgaagtctcaccttctctgttgtggggatggctttgtgtggtgcttaaaaagacaggttctggggccaggcatggtgactcacacctgtaattctggcactttgggaggccgaggcgggtggattgcctgaactcaggagtttgagaccagcctgggcaacatggtggaaccctgtctctactaaaatacaaaaaaaattagccaggcgtggcgtggcggtgtgtgcctgtaatcccagctacttgggagaatgaggcaggagaattgcttgaacctgggaggcagaggttgcagtgagccaagatcatgccattgcactccagcctgggcaacggagtacaactccgtctcaaaaaaaaaaaaaaaagtcaggcaggctctgcagttgaacaggctgggctcacaccccatctctgctgagtgctggctgggaaaacttgaacaagctcttatcctcatcttcccctcctctaagaaatgggaaacccgtagcgcctggctcatacgcttttgcaagggttacgtgagttattccacattgagtccttccaaatggatacatagaccacaccccaaaaatgtgaggtcctagggtagagtacccttgcgtcccttcagtatgtctgcttctgctcctgggcctgcccttggggctctgagcagtgcttctgttttttctgtcaaataggaaacctagagtgaagaagaggagcgagtgggaagtcacatctgggagaggcaaagagagatgatgggatgagggaaaggtgggagcccagggatagccagtgcccctgggtctttaggctctgagtttaaatcagccccattggcataggggcgtggttttctttttccacctgtgctcgactgtgtgggtggaattagacctgaccagggttagagtttccctgtgcaagtgtgaggaagcaagacaaaagtgaggagtgggagtgtgttacctgataacgtggatcctggagtggagtaggataagagagccagcaaggataggagggtgtaagagggtggaaaggcagtgggatgcatggtctgtgggaggctggggcaccccagagtcagagacctgagggactgcactaagaagatgagggcgggcaccgtggctcaagtctgtaatcccagtgctttgggaggccgagatgggaggattgcttgaggccaggagttcaagaccagcctgagcaacacagagagacctccaacctacaaaaaattttaaaaattagccagatgtggtggtgcacgcctgtagccctagctactcgggaggctgaggccagaggatctcttgaccaggcggtcaaggctgcagtgagctgtgatcacaccactgcacttcagcctgggcgacagagtgagagcctgtctcaaaataaataaataaataaataaataagatgagccatggcacttataaagtgggacacttgaacatgggatttagatttcagtgattggtgaaaagcctttctagagcagcagaatccactagaaatgaaaggtgagccacacatgaaattttaaagttcttagcagccaccttaaaaggtgaaaagacacaagaatctggccaggtgtggtggctcacacctgtaatcccagcattttgggaggccaaggtgggcagatcacctgaggtcaggagttcgaaaccaacctggccaacatggtgaaaccttttctctcctaaaaaaaaaaaaaaaaattagccggatgtggtggtgggcacctgtaatcccagctactcgggaggctgaggcaggatcattgcttgaacctgggaggcagaggttgcagtgagccaagatcgcgccactgcactccagtctgggagacagagcaagactccgtctcaaaaaaaaaaaaaaaaaaaacaaaagacacaagaaactaactgaaatacactagtgcactttagtgaatccagtatatccaatatattatcattttgacatgtaattgctataaagtttgttgaggtatttatgtatttttctctcatgctgagtcttcaaaatccagtgcgttttttacagtcggagcccatccctgcttgggccagccatgtttcctgtgctcgaagcaaatggcccaggccagggaggctggaattaggtaaggaggccggaaggagtgatacccggggatcaggagagccagggcagtgatagggatcccgggaggggaggagcaggtggctcttaaccgggaggtgcagtgtcaagtcttatgacagtgaacacaagtgctgggggtttttagggaggaaggagagggaaagttctagaaggaagcaaagagaaacatctaccgccctggcatatgactggtgtatgaggagaatgggaaaagaaaagtcctcatgggaaaggttaggcaggcaggaagcaggtctcatttagaacaagaaagtagaagaaacgcctacagcagaggctgagggaatgaggtttcacggctgatccgctgggagtccggtggcagatgcaggaaggtttcaggagtcagggagggagatagcatgaaaggaggataaacacagctgtttgggattaacagtgggtgatgggggggcctggggagtcctgggttttctgtgggtgcaatggactgaatgtttgtgtcccctccaaattcctatgttgaaatcctaatgcccaaagtgatgggactaggaggtggggcctctgggaggcgattaggtcatgggggtggagcccacgtgggtgggataagtgcccttataaaagggaccccagcggctccctcactctcttgctgccatgggagtataccgtgaggagtggggcggctgtgtagacacctgatctgccggtgccttggtcttggacttccagcctccagaactgtgagcagtacatttgtgtttatgagccaccctggctgtggtactttgctgtggcagcctggactaaggcaggggggctggctaagccaggactgagggctcaagcgatcctgctgggtggcctcagggcagaaactgctggtgaggctgtgaggttttgtggggaggagtttttcgaggagcacccaaagtcctagggcgcctcatccccatcctctttgccccgacctgctgagctccctcctctggcatggcctgctgtgtttttcgtgcgtaagtagcagagctggaggcttcagggacacggatgactcagtcctctacaagtggcaggggaggctctcagcatttctgtctcccaagccagacacccttcccactgaatggtggtaggaattgggagagtgagacaggtgtattcaactcatttgtttctgcccagagaagaaaccagttcatcaaaccaaagtggacccaggaggtgggcggaaggttgcattagcatcccagaaagaggagtggtttaaaaatggaactagctgagacctggcttccaacttgcagacatctttaagggacttattgtcattgacaaagggccaggaggggaactgggaatcttctgaacaaggagctggggccactctgtatggggagggtcttttggcctgaaattaggcagaaccctgagcctgctgcttgagtctcactgcattgatgccgcatagcttctaatccgtgtactgtgcatttgcagcgtgaataatggcatctttcaccagccccaggaacctcttgttcttcctggggggctctcaggctctctcccgcatggctgcagtggtgtcccagctcaccttggccaccctgccctcccctcccccagcttcctctctccacccctcagccccggctgcggaagaagacgcacaccgggcatcccttcccaaaaacaagcacacacacccttgattgttctcaagaatttttatgcagagtaacttgggacatggatgggggtggaggaaaaataacacacattgtatgaaagtgacaagatggagagatctctgaaagtactgagagaatctgtcccagaccatcgtaaaatctgcatggaattagccctggctgtctctccttcccgtgctctcctgtacttagaagtgggtgtgaaaggcttgggtgcatctggccctgtggaagaccaggctcctaccccgggtgccctcgctgagccgtctgccctgaggactcaggcctgggatgcagcagggcagaggtcactggtgttcactctaccccagttggttctggagagaggaaaaaaaaaccaaaatgtttttttctattcgctcactcatcacagaatgcttcacttcaggttaccaaaatcgatgaggatttctctccatcaacagccaattctgcagtgggttctctaacggatgccagctgggtgtcctctggttcaattcaatcctgatgcgatgcacctggtggtagccttggattcccacaggttgagggcccagtcccacaagactgctcccaccccgcacccacttcctttgattgactggctataaatcggggttcccaggactcccaccctgagtttgattaatttgctagagtgcttcctagaactcagggaaacactttactcacatttacaggtttattgaaaaggatattacaaaggatgtgtagatgaataacagagggaagaggtgcacagggtgggtctgggaggaggggtgcagaccttccatgccttccccagctgttctgccctccaggaacctctgcacatccagctctccaaacccagtccttttgggtttttatggaagcttcattatgtaggcatgattgattaaatcgctggctattgatgatcaactcaaccttcagcctctctcttttcctggaggttgggggtaaggctgaaagtcccaactctctaatcctgccttggtcattccagtggccagcctccatcctgaggcgatctaggggtccccagatccagtcatctcatgaatacacaaaaatcactcttatgactctggaaatcccaagagctttagaagatttttttttgccaggattcaggatgatgaccaggatgatatagacttcacaacatcacagttgttgaggaccctgccaggctccagggagacttgtttccctgggtccgctgtgactccaggcaggactcaggtgggtggctctcggtggcagtgcccctgcttcatactttccttccctcccctatggagtccccatgaaagccagagagtggtggcagcttcaaagacaggttatttgtggctgcctgttacagtgaacaatgtgagtgatgagtaaccattgtgaagtcagacttgggtgggtttcacaaagctccttggatgagctgagctctgaggttcctcccagcaataaaacgctatctctacctgctgtttatgagctgtgggaccaaagacaacaagaagaaagtagctgtttgttgctgttaaaactcaaggaggtaacaatggaatcattgccttctgttttttttttatgttcagagccagtttctttggaaataaacactcatttttatcagatccaatttgtgagtttcttttaaaatgggaggggggaaataaatttggataactccaaaatgctctaaaattatgactaagaaactgaaatattagtttttcaaggaaaggacattttgatgaaggggactgctggaatactcgctcatggttctcacagttaatgcatgacagaggcaggctttgcgttgacttccacagagccccagacccatgcttttcccccgaagcactgtgagagatgctgcctgcttaatacagggaaagagggctgtagaggttcaaggttctctccacaatgtagcctgacactgggggaccctctccctactcatcctcagctcagggtgccagggttgtgttgtttttatataaactttcctgttctttaatgtccgttgccaaacatctccctacccccaggatagagtatcttagcaaaaactctttggggtattcttgctcccggttttaggaggaagtcttcacaatgtttacctctaggaataatacaatcttttgatacaaccccattttcgatgtgtcctattgaaaagaaatcaaggaatttttttcaccccataagtcaagctcttaataatagtaagacttttcatatgctttccaagaatgtgtcttcaccttcccttttgatatgacaaatgccttgctgcagagctgtggcctccgtgccatggatctgtgatttcaccactgaatcagagagtgagcatccaggggcaggctcaggccttggtatgactaagaagctccatgtgtgattttgactttcaaccaggagtaaagtatctattctgttccagtgattagcttctacagtttacctgcatgggcacaaagaagcaagcagagaccctggatatgcaaagaaagcccagcttttaattaattaattaatttatttatttgagacagagtctcactctgtcacccaggctggagtgtagtggcgcgatctcggctcactgcaatctccgccccctgggttccagcagttgtcctgcctcagcctcctgagtagctgggattacaggcctgcaccaccaagcctggctaatttttgtatttttagtagagatggggttttttcatgttggccaggctggtcttgaactcctgacctcaagtgatctgcccaccttggcctcccaaaatgctgtgattacaagcatgagccactacacccggccccagcttttattttttcagaccaaaagtttgctctaaaaatgtgtttttccagccaattagagtttgtcaattatttgcatacggcgaatgtaatagacagtctttgccacaaaaataactgttcacatgtgtttgctttgctgttcactggctgacagggagacacaccttgcctcagagaaccttagagactagtggggtcgccagagaggtaaagagataatggttgataatgaggatggtgtgaaagatgcatgcaaggttctgacatggttctttcagtggtacttaattcttaatatactaccttctagaacttttttctctttttgggagtcagggtcttgctctgccactcaggctggagtgcagtggtgacacagctcactacagccttgaactcctaggctcaagtgatcctcccgcctcagtctctttagtagctaggatacaggcacataccaccatcctaggctaattaaaaaaattttttgtagagatagggtcagattatgttgcccaggctggttttaaattcctgagctcaagcaatcctcccatctcagcctcctgaagtgctgggattaagtcatgagccactgcctggcctgaaccatgttaaaacttgaacatctaaaatttggtttttcttctctataaatgaaatttctttggtgtgtatcaactttcttcttgcaatatgtcactgaactgtgacttagttactttcattaaagtcagtgtttcccaggatgtggctacatacagcatagtggtgttcaagatgcctctgatacacaggtataaatctgttaaagtgtctactttttttgtttttttttgttttgttttttgttttgttttgttttgtttttttgagacagagtctcactttgtcgcccagactggagtgcagtggcaggattttggttcactgcagcctctgcctcccaggttccaacaattctcctgcttcggcctcctgggtagctggggttacaggtgcctgccgccatgcccagctaatttttgtatttttagcagagacggggtttcaccatgttggccaggctggtcttgaactcctgacctcaggtcatccatctgcctcggcctcccaaagtgctgggattacaggggtgagccaccgggcccagccaggtatctattttaatgtataataggaagatactaattttccacttacgatgataaagtttccttccaaagaaatttaagtttaaatgtatttaagtggagtgatgttaagaaagtaatagcccagggacactctgctatggcaagattgtgcaggctgtatgcaggggaggatgcctacagaggagaaaccatctacctgctgctcccagcaatcatcaagcagccacgtgctccacaccgagatgaacaacgtctcccagcctggcattctgggctcttctggcaagtcactgttcatttctatttatttgctcagagccactggccttgccctctctagacctcttggcttcctgaccttccagatgccaccctcacttctggaggccactgcaaaatggaagaatctttcccatgagtctgtttgagtttgggagagtttttcttcttcctgttgttgtcgtagtggttgttgaccattttctccagcgctctggtcttgtgtgtgcttgtgtctgcagacaacctgttaatcatgaacagctttgtctggtacttcctgcagatggttcacacagagaggaagactgtttgctccttaaagtcactgttttcaaatttataagtcctgtacattggactctgaagtgaagacaaagagaacagagttcagcccatctagaaagggctgtccttcacaccctggtgaattgtggcctcctccatgcagactctgtgactacctctggcaccgagtgcatcgccacctgtgcagggagcactttgcttgtgtcaccgctcccttccgcaccaacctcattcttccctgtattgcaattaccgttttatgcatcgtcttcccctcccaaggctgcatctgaaaggcagtggctgcatcttaatctctcaacaaatattttgagcatctgctatgtgccaggcagtggcctgggagatgggcagttggaagtgaatgacgctaacaaagtctctccttcccacagtgtgtcatctttgtattccccagcatctattataagtgtgttagttatctattgccgcataagaaattaccctaatactgagcagcataaaacaaatgtattcctcttgcagtttctgaggaagtagtgggtttttttttaaaaaaaagccaaaattttgttaattttttcagataaattttgcacacacatatgtctatataatctgggaggactccagggacaacttagcagagtagtcctggctcaggctttctcaagaggttgtgatgcaggaggagcaagccccaaaattggagggttcttggctttgcccaggaaagaattccagggtgagccggtggtgttagtaacttttattgaagtggcagtgcacggcagtagcagaggtgctgctccctgcagagcagggctaccccataggcagtgtgaccagaacaggagctcagaggcagttctagaggcctatttatgcccatttttaattatatgcaaattttgggcagtttatgcagaaacttctagaaaaagggtggcaacttctgggttgtcaggttattgccatagaaaggggtggtaacgtctgggggttgccatggcaatggtaaacaacatggcactttggtgggtgggtgtgtcttatgaaaagctgctcctgcctcgtcccttttttagctagtcctcaggttggtctggtgtctgagctctgcctctggagttgaatcttgtctcctacctcggttgcagtaaagatattggccaggctgccatcatccgaagccttgacctggcaggaggatctccttagaggctcactcacctacatggctgtcagccaaagccctcagttcctcaccacataagcctctctgtgggcgctcatgacatggcagctggcttcccctcaaacaaaggttccaagagagaaagggtgagccagaaggatgctgcatgtctttggtctcagttcagaagtgacacaccattacttctgccatgttttattggtcacacaggccaatcctggtacaacgtggaagggggttgattgcagaaggtgctgggatcgtgggggctattttgaaggctggctaccagagtggggcttttccacagtggatgttccataaatgcctgttaaagtttttacccctacaatccttaagtcaaaagctctacttttatttttaatagactttgttttttaatagtagtgtcagatttatagcaaaggcaaatggaaagtacagaacattcccatataccccgcctgccacccttcccatgcacagcctccccctctgtcaatatccccaccagaatggtgcatttgttactatcagtgaacctatgttgacacatcattatctcccagagcccatcatttacattagggttcactcttggtgttgaacattctgtgggtttggccaaatgtctaagggcatgcatctaccattacagtatcatacagaagagtttcacttccctgaaaatcccccgtgctccgcctgttcatccctcctgccctcccaatccctggcaaccacggatctttttactgcctccatagttttgtttttcccagaatatcacatagttagaatcatacggtatgtagcttttttagattggcttattttaccaagttaattactcatttaacattcctccatgtcttgtcatggcttgatagtgcatttttaaaaaaattatttttaacaaaaaagtaggcatacgttttgccctggctttgctgataggatcattttggagtgtttgtaatcttctgctaagtttaaataatttgaaaggtttacccagctaacatgcttctgccacttggaaaaaaaaagtccataaatgtgttttgggcagcctttgtgacttgtcgttgtcttaaattgtcttctttcccttgcaatcattctctaagggccttgccagatcattcatgttctgcttgtctaaccatttgtgggaaacctctatttgaaaccctcattatgttctatttaaaatatacttggtttaatgcacaaagtaaccaagtcttgctcaaagaactaaactctctcaaaggaaggtctgtgttctgcgtgttggttgactaaggcacctgtcacaagtaggtgcttgctattaaatagaagcctcaggtagagggcaagggaaatattctttttaatggggaaaaaatagacatcattgcacattgacccactcctacagtgaactagcaacacatatgaagatgacaaaggcaaacttgaagttaactgtgttcacggctgtgtgattttcctcctcctattctgtcatgaggctaaggagacagcagggctcagagcaggagagctgaaactaccaccatgagaatgaaaccagtaattgtataatattattcaatgctatacctcctactctgactcttgagaggaacagagttttctctggtaagttgcaaccagacagctagtggctctcaccagaaggaaaaaaataaaagaaatgctaccaggagcctacatatttaggagcaaaaccctttgtagagcctagtgtatggtaaaggatggaaaatcccagaaaaggtttagggtgagttagaaagatgtgctctattttgtcttagcggaaaatcagctcaactcttcaaaacttgctaatgtaaggatgagtgagaatagtcattgacaacttgctcgacactgcacccaatgtcttatggaaatattatgtaatagctctgtttagctggtttaacagcagtatttgtaataaaatgaagtcaatgagtgagaaaatgttccttatataacaatacctctgggggaccagggcagtgtggatcgtaaggtaccaatagtcaccaccattttccttgtggtcataaaacctcctgaggccaaggaggtagtaatgatacctgggaggcgatatgtaacctttgaggtatccttgcaaatgggaacctatgaaggaattgcaaacatggtactatccttcaggatgttttctaaatatcaattattttagcctctcttgacaacctttttctgcccactccagttagtgacactcctctcctctcctttcctttttcctttcctttcctttgacagtcttactgtgacacccaggctggagtgcagtggcgtgatctcagctcactgcaacctctgcttcctgggttcaagtgattgtcctgcctcagcctcccaagtagctgggattacaagcacgcgacaccacgcccagctaatttttgtatttttagtagagacagggtttcaccatattggccaggctggtgtcgaattcctgacctcaagtgatccacccaccttggcctcccacagtgctgggattacaggtgtgagccaccgtgcctggccttagtgacactcttgaagtggggacagtccttctggagaggggtcttacccacagggggtaaggaacaagcattaaagggataagcattttttaaaaaaatgccgtccccccgccgcccccacccagtgattcctacatgccctgctaacatcagggagaggatcccttctttccacttccagtcaacagagcagctggagatcagtaagcctcttcatgggccatctgagaaggccaccttgaaggaccagttcagctaaaagatcaacctgggtcctggggccggatttgctgctaactgacatttgacattctttatctgtacaacaaaggggttgaattacatggcccaaaaggccactacagcaaggatatttccctgttccattttgagcagaagctgaggagtgtcacaggatgaggttaccatgttttctagcaaatctaaatgcaaggttgcaagctggtcagaactggcttacagatgtgttttgtttacactccccagtgttttgtgtttgatgaattagttgccaacccttaaaaatagatgtagaaaattctggatctggccacacccaccactcatccctgcatagtagcctctgccagagcaggcacgtgccgttggcctccccacagtcccactgggcccatttctctcattcccataccttcccagccactgtagaagtttgagtttgcaactcctgttttaatttctctttatgttccctggatcccatgggacaatgacactttttaaagccacatatccaagactatttcaaggtctttctgctgcttggactagctcaagaagagttggtttttgtgagcatgtgagctgtggacatgtgatctggcttgatcatgaacacagagagtgggaggagagctagaggctgaatgtgatggtcctggaaagctccccatcaagtggctgcattctagacatgcaaaagggatgtgagaagttcaacatgaacatctgcatgcatcagggagagatgagaccaaaaaagaaaagagcttatggggtttttaagtgtcttctttccttcctcctcttacccttattgtccaggtccatgtcacaaacggcgggcaagcatctgctgtacccagctggggtccctgtcggccctgaagcatgctgtcctggggctctacctgctggtcttcctgattcttgtgggcatcttcatcttagcaggtaagagcaggccatttttgtcctggtcttttgggatgaggaaggaagacctggagcttccactcttcattcccactgtcatgagcccaaacactgcccttgtcaccatggaaaccatagaggaagaaggaagaagctcttcagtagtattgcttgttttgcgtgggagtagctggcaggggctatgtgagcttgtggaatcaaagagaccagcagtagagacctagctgcttggagtggcttctgacttttcctgcatcattgtggggcattgtgcattacactgggcctccctgggcctctggggtatggtttgctctgagaaggctgggcgttgtctaagcttctggtcctggggtgccatgaaaatagttgtgaggcactttgcttcctggtaaacctgctgccctttgcagttactgtaggtagaatgggtttgccccaattcagccaggctctccttaccaatttctatcttttgagatgggcaggcgatgggctagggctagcatgttctccagccatggagaaggagagctcatggactcaagaagggatggaacaggagcctgttggccccaagctgtgagcagcccagctcatcatctataggtagtccctatgaagacagatggtgaagcagatggctgtagtggtcttctcctgactccctttgaaaggaagggctgctcagttcccacctttctcagtggaggtaggtaggactggacgcaagtaaggctgagagatcagtttatttccacccaacatgtctcacatgagtacctgccttgcagcaggctccatgctaagattgggggcacagctaaataggacccaggggcttctctcaaggagctcccagcctaggaactgagggggtcatgcagatagagccctgcctcaaggcagaatgcagcgggcactgtgatggggtgtagcccaatgcgatggtgacagagcaggcacatagagggaggtgcggctgctgcatgaagcaggtggagttggtgggagcgaggctgctggccaggccgagctgacttggagcactgagggaggggccctcgggtgaagcccagggcaggaatctggaggtccagcccttacagatagatgaccttttgctggaaattttgaggcaaatggccaggacctccccggtcttgattcactttccgtcaagcgggactagtcagttgggtgatgtaatggggtgttcaatgctgcctgagccttcaggtttccacactcagggcaaagacattggggtggagtctgtcccatcaatgagcaacctgaggggcagccaacagcaacaacgagagaacctcattattcatccctgggaccagaggacaggggccagcagggtccctcgcaggccgagtgggccagaggaggatttgaacatgttctcgggctgcttggtgagagcttgggatctgagttttgtgggtttggctgcgaggaccataacaaatttctggaatgttcagaaagcattccagcccaacaggaaaccagaacagggacttttaggtgacagatacagaaaagctctgcagaacaggaacttttaggtgacagatgggggtctggaggagagggaccaggctggtggggggtttggggcaggcctctggaggtcctggaagggcatcgtctcttggggaagagaagacttgcagtggagtgacggttctcttctggtgtctggatggctgccatgtggaaagggtagacatactctatgtgaccccagaaggcagagctaggaccaacaggtggatgttattaggagacagatttccattcaaaataaaggacagtttgctaacaagtagtgccgtccagtatgatgaaaaaaaggctttctcctggcttggagattgaatgaggtttataataatgtcctggaagcttcagaaaggagggtggaacatggtttcccaatctaatagaaatgttgccatacctccttaattgttccagcatttttctgatcattataattatcttagaacctgaagtttctgggtaccacattgcctgtgttgaacaaaaatttggggtggattgggacggagctggtgcaacaatgtcgtacctgatctcttggccctgggtgtgtggccgctcttacctccccagattcttgtctggagaatcatgctggcctctgggggaggtttggtgagggcagcataggaaagggacttggcaagatggtggacaagtctgaggttctttaaggaggctctgtctgatcttagagaggtttcttaagattgcctgattgaagacctcagcgatgctccttctcagagataccaagatcaggggtcaggggagatccacagtccagtgtgaagaagagcttgcctggccttctgttgggtgtcctgccatgggagagggcttccccttcttgggtagaactcactgcctgtgcccagagaggtcaccttgcacaggagatccatttaaaccattcttaaaacctccttgtcaatgcaaatctcatagctcctacaactggatgacaaaattgtccactgcaacccagtgccatatctgaatatgggattagcaacatctcggtgtgcaaatgcttactcttactgtttcccagtatgaaaaatctgtaatcaaactacaccaaaatatgagtcttataagccccacataggacttttctcaattcatcttcttgcccaaatactgaaagtaaaaggcaaacatgtacctcacgtttatgcattatccaagtttacctgtttgaaggttaatccggccaccacccaaattattctatcagttggattctgcccatcatccaacctgaccagtgtcctcctgggagctttactccaataatcccatgctggcactgggttctcttcccttagctcatagcctgtcatcatctcccaaggagacggcaagagcctcctcctacctccaatacctctaagcttttctatctcttcaacacattttgattattaccttggctgaccgttccctattatgttttcattctgttcccgattcatttttgaacagtagagaccatcaggtttaagttcatgaactaaagaattgagattgcctggtcgtgtggccagggggtcctcaatccagcacttcaggcaagatgtcctttgcaatagaattaaggggtcagagggagctcagtcttacctatggctcttctaggcagtcactgtggtgactgggtgtggtcatcaggaaccatctcttcttcccctttcctgagacagctctgtagataagtctgaattctcactgtggaaatgaaacagcagaaaggggaagtgaaaagatctgggattcgaatgtggggtgaggctgcagcatcgcagcaatgtagcaagaccactggtctacagggagagtccctagggaaatatgggctcctcctgcaccttaaattagttcttttctaacagcaccattcggtcgttgtcatcatcatcctcaacaagtgctgaatttgttcatgagtgttcggtgagtgcagggcaaagggacaagccctaggaataaaacgtcatgagatgtaggccctgcacaggagggtttaaaatcatgaatacatacacccattgtcgggcaatgtgacgtagtttctgctgttgccaaattatacaaaggagagcccaatctctgagggctggaatggttggggaaaggcttggcctgcggagagttgtccacctggctttgaactgagtatcccttttttggatcaccttgtttcaagcaggtctgtccctggactttgcaggaaagaacaatatgctcagagcccatgtccatctacactgtagcttcctgattctatcacgcatcttgggaataggagcataatgccatcaacctttattgggacactgtcagaaacaaccctgtgaaatttcaccccttgtgcttattgtaagaatgatgttgaggatgttatttgttgcattacacaatgctgtactcaggggacccatgcaccaattattttctgtctcagtcatagaaggagttatgtgttcctcgaggaatttgttttcaccttatggagactgtgaatctgaaagtctttaaaattactttcaaggaggtaattaacacaaacttaagagtcagctgtcatcccttgtatgaggatatgtgaatttgaaggtcattaaaacaaaaacctggggacagaattgtggtccacctgcagcaagtatagagacttcaggaaagcatttttgtgttagtctccttcctggcttcattcggggtctctctacttgatcttctttacctgcatctcatctactttaatcttagtgtagttaatgtatccttgtgaattgccttaattctttacggaacaaggaagggtattatgtacagttttatctttacaaaaatttctgcctattctacttgattcttcaaatgcatgatgtttttaatatgtgaatgaatgacagagacaagggaatctagaaaatatttgtagaaaaaaaagatgattatttcagttttaaccaagtacctaattgagatgaatatggaattgctacccagggacatttagctagtagaagtggcaggtgtgtgattatattaacacatctaccatgttatatactgcattgacattacagcatttaagaagaatattgagacaggcaggaccgtgtagacttcacgctggttacaagtagggactttggagccagcctgtctgagttggaaccctggcttctctatcaccagctatgtgacattggccgaggcacttggccaagaactcccttctctgaaaacgggggaaatcagcgtactccctatattagtctgttttgcattgctaaaaaggaatgcctaacatgggataacttataaagaaaacaggtttatttggctcatggtttcgtaggctgtacaagcatggcactagcatctccttggtctctggtaaggcctcaggaagcttccagtcatggcagaagacaatggggagtaggcacgtcatgtggcaagaaacagaaaggaggaggtccaccgtctttaaacaactggttctcatgtgaactaatggagcaagaactcactcattaccatgagggggatgccaagacattcatgagggtatccacccccatggtccaaagacctcccactaggcctcacctccaacactggggatctgacttcaacatgagatttggagtagtagctattgttattgctggcattggtattaccactattattagcatcgtcactcttactttttcttcgttttctttgcagtcaattaaccttgatagcataacctagggtttagccccaggttatctgtgaaggctctgtaaccttgggaacatcactttgctgtctgaatgggagttcacccatttgtaaagtgagcaaattgggcaagattggtggtctcaaacattttttaccatgacctacacaaccagtacacacacataagcatagctgagataatacttaaatttgtaatgcctttctactctattctatttatgtttttttaacatgatcacaactcatttatttcataattcatgaacaggatataagctgtagtctgaaaaacaatgggctacatgatacttctattgttctctgtgtctttcgagcattctgggagtagctatattctcttcaggatatggactttgaggccagacttctgggttcaaatcgaggctgtactatggaatggctctatcattttgaggcaaataatttaacctccaagggacttggttttttcatctgtacaatgggttgatcgtggtgcctaccccatggggctgttgtgaggactgaattaaataatacatgaaaaattaaaactctttcactgcctggcacgtaagtactcagtaggctgggacagtggctcatgcctgtaattgcagctcttgggaggccgaggcaggaggattgcttgagcctaaaagtttgagatgagtttgggcaacatagtgagacctcatctctacgaataattaaaaaatgagccaggtatagtgatatgtacctgtagtcccagctactcaggaggctgatgtaggaggatcactcgagcccaggagttcaaggtcgtagtgagccatgattgcatcattgcgctccagcctcagtgacagagcgagatcctgtctttaaaaaaaaaaaaaaaagtgctccagaaatatttgatattattattcccacaatcagagacagtttgctttcagaatagcaaaggattacagacctacttgtttagcctgaacacccagtaactttgtctataaacagaactaggctcagtgcagtacgtgtccatatgcacatgtttccaataaacacacagggaagcctggagacattgttggagaggtccttgaggtaccgtgacagcgcagggctcagtaagccaagaaacaggaacagaacagcatttccaggattgtagctctttaggggagggagcgatggagccagcaatggctccacccatggcacggagatgcttagcttcagtgggcatctcctacaacctccctcccgacttcccagacagacatggtgttgtgcttttcccaaaaaacaactgcgagtcacagaaaccccttccttgtcctccttgactttcccatacactgtttctagttcttcttgccggaacaaatcatatcataacaaggcattctcctcatcctcacgattgctcatcagtgagttggtaacaccaaggaaagtgaacccagttcctccacctttgtgtctttgggccccggtcttcacactcaccatgctgtattgcaatgattggtttctgtgctggctctcctcctagtccgggagagctctttcatgatagggcaccgcaccttgttcacagctgtcctcccactgcctaccatcatgtgccacatatagcaggtaattaatggaaggatcaaattgaatgtctcaacagaatagccatcctcccaacaggctccaggtgtgagtagtcaacagaattagacaccactcctggggtggcctagccaggggggagtgtgccaggctgtgaccatggatgttgatattagtttaaattctcatgagacttactattttttctttttctttttgagacagagtctcactctgttacccaggctagagtgcagtggtgcaatctcagctcattgcaacctctgcctcccgggttcaagcgattctcctgcctccgcctcctgagtagctgggattacaggtgcatgccaccaagccgggctaatttttgtatttttagtagagacagggttttgccatgtttgccaggctggtcttaaactcctggcctcaagtgatcttcctgcctcggcctcccaacgtgctgggattgcaggcatgagccaccgcgcctgacctctcatgagactttctagtgacactcatagtgatacacgaccctacatccaaatgatggaataccatgcagccctcaatgatcaggtcagatctcctcctcaccccatccccagatctctttcaaaggaaaccattgcctagtaggtgctcccccattgcgtgtcagtgccactggctttgttggtcttgttgcttcaagttaaatgcagatcttgtcagcgatcccagttagatgtcagcacactggtttctgccaggtattgcagtctgctggatctgtttggctctggacttggacatctgtcatttatttttaacaatcagcctgtgctatcaatcatgttggagccagtgtcccaaccatgtccctatagtccccattctgtagcctgctgccacgcgtgcagttcccgagaggacatgacccagggcttgccagcccgtgcacgcatttcaccccttgtatcctgggaggtgagtcagggtcgtttgaagtccccccagcctcttccttagactcagactgcacacacctgggcaggtcactgtacttcccctgcccccacctcagctctgtcgggctgccctagccatcagagcttctcctgcagaaggcacctctgtctcacctcagaccccggaagagggggaggaggagggatcaagagccagttgacaccctgagtttcccatggaagattccactgcccagggtgatgcctctgaccacgcctgagccgggtagaagttgggggcagagacagctgaaacactgcctgcgaatctgacaagtactccctgttctccagagcttcagccaaagccctacttacagcactcaggacactgcagagcacccatctctcagctccatcccactgcaatccttctaggcaaagagccaaatccagccaccacctgtttttataaagttttactggaacacagacacgctcatccatttgtgtactgcttggctgctttcgtgctgcaatagcagggctcagtagtctgtgtgcctgcagagcctaaaatatttactacctggcccttcacaagaaaaccatttgccaaccccatgctaggcttcactgatcactaattagccctttaatccttcctccctggattgcaagttatagttttcagagatttttgcatacattgtgtcatctaattcttacaacaatcctaaggaatccagaaaatagctcagtttataaatgaggaaactgagacttagacgcattgcctactctggcccacggccccacagctggggaatgggtgcctggactgcagctgggaatggcgtgaattcagggcttctcccacccgagcctcctggtctgaggcagaatctaacacccagtggtgaagtgcatggcaccggagtcagactgccagggtacaaaccgtgactttgccaattgctatgtgacctcaggcaagtttttcaacctacctgatccttaatgtcctcatctgtatagcagagcagaagggattactctgcccacttcgaagtgttgtggtgaggatgaaattaattcatccgtgttaaccgcctagaacagtgttcagcaggtgggatgtatcattggtgtttgttaagtgatttataaccgggtgtaagtgccacagactgcacagtaattcagcttcgaatatcaagagaaacatgtcaagtgctttgatttctatcccaggagccaggattggaggaaacttgagagtcatcatgcagtgcccaacccttgctaagaaaaggagcttttctatttaagcaaaaagagaaagggagtgggcttgagtccacccctcccttccttctgcagctttgcacctccctgtccatgcctcggcctctgtgcctcctaaacccacctctcctcttgctttctggaactatcttctgctgggtgtgcccagagctaccaggcagattttgccatttactgggggctttgaatttttactggcgtggaagctgagcaactaatgagctcccgtcctccacccttttggagagaagttataagttctgggaatttctgtgacagtcctgcaggcatcgtgtcttggctgacctcgcccaaggcttggggccctctcccatcaaatcccaaacaacaaacacttaccaggtgccaacaacgagcctagcaccgaatgagacacagggagatgggaagagaaataaagagaggcccctgctatgaggatcatactgactggcagagcagatatgcataaaatatgctatcaagcacagggcagatcagaagcttgagaactaggaaaacctgaggtcaagtatttgatcatttatgagctgtgatctggggaaattgtttaaacctctctggacctcatttttaaacaccaataaaatggggataacaatgagtaatcatcagtatgatgaaaattcagtgagataatacatgaagtgcttttgcacaatgcctggcttatactagggcctcaataaacatttccctgtaaatctcagaatagaggtttctgagaagtcccagtttaattcagggaagaaatcataggtgtccgttgctgcccatctctacctgctttacttgtaaatctcaggccttgtcccttttctctccttttatatatgcatatatattattatgggtttggggatgtatgtacaggtttgttacatgggtatattgcgtaatggtgtgatgtgagcttctagtgcaaatagcatcactcaagtactgaacattgcaccccataggtagttttccaacccttaccctcctcctcttctctttaactgaactgtctttctagtgactgccatcaagttccatcagattccatctctgtcttcgccagaattccaccttctcgtggcctccccacttggttatttaacaaacatcatctcaaatccaatgtgtaatcagaagtcttgacttttctctcccaaacctgcttctcctccagtcctttccatctctgtaaatgacaccatgatctacctgaaaccagtgcatgctgccagctgtatctcacctgccccccatgttcatgcatcagaagccctgaggagctcccagcaccctgacctgcacccctccagtcgtcgacacatagagttgccaatgttagccaataaaaatacaggagcccagtaacttgaattttagataagcaatgggtaattttccagaaaaagtaggtaccaaatacttggtggaagcacccaggagggaaaagggggaggcagaagggctctcacattcctgtccagtcttcagtcttcaggaggtggagggtggaatgttgggcagtggccctccctggtctgtctctgtttttagcagagcctactggcccctcgctgggacctccaggcagatggtgtgtttggttttgttaggacaatgttcagcttcaccccatgcttccagctcagagacaggaatcccaagtcttcctttgcctgtgtggccttcctctgtgcagcccagagtggcccggcagctggcagcatccctgggtgcctgcctttctctatgctccttctggaggcctcatattctctgagaccctttttggagcaatccaagggatgcagggaactgggggtagggtggccccatgctgtgctcccgtctcgccctgctgggaaaccctggaagaggtgcatgataggacatctcccagggtccctcgctgtgtttctgtctggtaagagtcccaatctgagctcagctgtcaactagtgggggtgccagtaacactggtcacagggatccccatctctagaggggtctctggagcccctggatgaacatggggtggggcagtgacaatggtgtcagaagtgacttgtaggatgccaaggtgccacctctgagggtgggaagtggtggatcctacagagcccccaccatgctgagttccgctggatggagtgcttctgcaaagcactttgtttctcctgcttgttgtcaaaaacaacagtctggcaggctgtcttctgtgagacattttcagtgtattctctgccagagctttggaaaaatggcatctttccgggaggagtcaaggaaagaaaggcattgcttatttaccaattaacacttgtcccctgaccattggctgcggccatttagcacatctaaacaagccagttccttgaggaagtcaatgacctttcaggatctataaaagtagtttatatgctttggctcagaaatcctcttctatttgtctccaggaaatgagtacaaagaaagaaaatggcatatgtataaaactcaaccacattcttcataatcactcaaagctggaaagaacctaagtgtgcagtctcagagcattgtttaaaagacagttaacacaaaggagtattatgcagccatttcaaatgtaactatgacatacatgagagagtgtttatgaaattgcgttaagggaaaaaaagagcaccccttagtgtgtatacactgtgaatgctgttgtgcaaacaaacatatattacaaagggcaaaggatggaggggaatttagagaaatgaaaaccgtggtggagtgggtgggaggtttactggtacacattctctcaatttccttaatgttgttggggttgttcataagaccacccttttaagaggtcacaggaatcttctgtcgccccgagaacacagcccccagcatggtgttgactgccctggtggaggggccagctggcctcttctagtccttttcctggtttaaggtccctgacagcagagggtcctggtacctgggaacagccagggacagaagctgggtaagtgccctgaggacacaagcaaaggagagacagggtgacaatacagtcagagctgggaacgatgagttctgccctcagctttgtaaatgggacggaggcccagggaggggaagtgtcctgctcagggtggcagagtgggacctgcatcagaggctccaatcccccaggaatccttgcctccctcctctggggtctcagccgctcctcagatgcagaccccgactttctggagccccactgggctcttgatgcctattgctttgctctgccaatttaaaaaaaaaaatcttcaaccttttttgggtgtaaactcactattcagatgctccaaatttcccatacaatgtttttctaaggtgactcccccaatgggcccgaccctccttcccgtcaggggcacaccccagggttttgatctgagtcttggagcttgtgtctgcctttgggcttcgccatgcatctcatgtgtgttctcataactctgagtcctgatttctttgtgtgctagcaactgccgtctagagagctccacgtgaagggcactggggacttctgattcaacaggcccaaacccaaactcactgtcccctctcatcgcagcctcccttttttctcccttcaattaataacataaccgtctaaggtataagatccactttatggagttaccatcattgtttaaactgaatctccactgtcggaccctctacccagctctctacctgaggggctggacagagcaatgcgtcaatgaaaatacacagctggcaagtgcaggagatgtagggctgctccttagctggggccccagtgggtggcccaccgcatcctccgtgggcaggaagagcaaagggctcctgcagcagacccacccatgcctctgtgcttcggactctcgagacagcctgagaggccaccttttcctgatcttttgagagcctccttgtttcttcaatgtcctggccccctgggttccctcatgcttccattccatggcttccttttagcctttggccccggttgtcggcctttgggccatctgctttccgtctggattgggctgtaggaagagagaaaggatgcagggcaggcctctctggctctgcttcagggtctgacatccacatgcatctgacatttatcctgcaaaagtgatctgctctaagcaataccctgttcactcttgtgctaaaaaagagttcctgcctctctttctctttctgacttttgacaaaaggctcccttctgttatcctggcttggcctgtgcttggttccaaaaggaactgggtatgtgttacgactagaaaaggggtgaagagagagtgggaaaaaaatccactctgtctcacagtgtttcgctacaataaataatgcttgcacacagtccattgtccatacggccaataatttccttaggataggtccctacttggggtattgctgtcaaagtgggtatatgtttaaggcttaatagaaagactgcaccaatttgcagggaatgataggatttttcattattctgcctctctgcatggcttgtcactctcaggcccacaggaaggtcttgctggctgtgaggagtgaagagtacagggctaagggaagtagctctgcagggtctgcagcctgtgtcccctgggtgatggcaacgaaggcagaaagccccctgaccactccctgtgcaaggacttggtccataaagactgggatctccaccccaacccttgatctccaactgccagatggtcagaaaacaaccacccagctgtgtccatctcctaggactgctcaaagtacctcaaaccgggtggctttaaataacaatttattttctcacagctcggaggatggaagtccaaaaaaggcacgagcaaaggctgcactccctctagaggctgtgggaaaggatccttctttacctcttccagcttctgggggtgccagccacccctttgtttcttggcttgtaggctcattgctaaaatctgcgctcccatcgacacccaaccttcttccctacatgtctgtttctgtgtccagatctccctcttcttctaaggacactaatcatattggtccccaacccaatacaacctcatcttagtttgattacacctaccaagagtttatttccaaataggttctgggtggacatgagtttgcaggggacactatcctgcaaaagtgacctgctctaagcaacaccctgtgcactcagggctaagagagcatgtcacctggagctcacatgtccctccttctgggtcatgctctgaggacctgggactggaattctctggtgtgttcgagttcgctcgaagtcattccccgtgaaaaatgttgaaaggaagaagggattccggacctcctcttctccagccttgtctcagggaacctcccctgcatgaggaagaggaaggattttccttcctcctctgggtacaggaggcacattccctggcgtggagcacacttgccttctgccttaccgtgtggccatgggcagtcgctgatggcaccgtgcaggacgggacgggcctctgcaccggaggtccagcctcgggtctcctgaccctggcactgccacaagctgtgtgaccttgggcagggggccttgcccctgtgagcctcgggggcctgaccacttgacacatcaatggtcaccagtcattcgttggtcaccaagaaaacccatgtctactttggggctctttaaaggttctgttgggggctctgggttgagaatttctgggctggaccttcagagctccattggcgccgatcagtttttggaccttgggagtgaccacagctccggctcccacactgccctcctgctccactcagcacagctcttgtcctgctcaggcattgataccggttttctgtgtctgactccacactaaactgtgacctttctgggggcacatatatgaatccctctgtatcattcactagcctaaattttagaattacatggacttgcatttcaaacccattctgctctttttaaaaattccatgagtttgggcaaatttctaaacctctttgagcaccagttttcttatctgtaaagtggggatcctaaggccatcctctgagtaacgtggagacccttagatgagatgatgtattaagcacccaccattcctcttgagaaggggtgagtccctgtgtatggtactataacagcagttattggtgaggtctgtggaataaatggcttagtccacactgacctttttttttttttcccataaagctgagtgctgaaataggagttttgtcacagagctcgttccgatcggttgaatgggtacagaggtgctgtctgttaatatacgctcaaggaaagtgctggcactggattccgaggcattgctaagtgtctcaggttcctgagaccaaggcacctgccctagtccccatgtgttagagggccccactctgtccctctggccgcttcccaacccacaaggtgaggcatcctgagggctaagagaacatggcacctggagctcacatgtccctccttctgggtcatgctctggggacctgggactggaattcccttccccaaagcctcagctttcttccaggtcctttgggctgttctgggagagggaaaccacggtgctggccagagggtgacaaagggagggttgcttgccggcattaggtggggattagagttggccgtgcaggctgggatgccccccaagcacgggcatgaggcctgtgtggaaagggtctgctcgaggatgggattgggggtgtgtgtggggtgggggtctccttacaaggcagggatctggaccaggttccaggtagtcgtgcatattcctggcaacccccaggtctggctcgcgtcaaagtgcagacataggtggtttaatggcaaagagcgtgtgggtgtccctgcctcagcccctggggctggcatgcagttggcaggaggatgtgctagaccccttcccctccttggtggctctgcacctgccctggctgcaaggactcactcccaggtggccagtgggtggcattcccccagcgtttccaggctctcagcccctttctcaccacaaggagccacggtgggctggccacattactgagcctccctaggtctctgctcaggccctggtggacctgcccaaggccagcctgcttgttcatgcttagcagcaccatcagcaaggccagcttagtccagctccagaactttctgcaacagcccttctttctgtggatgggcagtggctcccctcaggtcccaccccactgcaacctgcagggcctcttcaggagccagacccatgtccctggccccttctgcacccgggcaggctgtaggggaggactcagacctgagacactgccaggcaggggcttttcccatccagctccgggtaccgtgggcgtgagtttccacggggaaaagccctcttgatgggatgcggttggggtggaaggaggacaggaggtgagtcaggcactgctgctgctctccgatctgcctgccctgcttccaggctgagttatgcggcaacagtggcctgattcctgagctactcaatccatagtgtcccaaagacccccatgctcccacatggtagctgccaacctcacccaactccacccttacggttacagtaataatcatatttcccatccaataggttacttgagcctcacccactgctctgagggagacactattatccccattcacagatgagaagactgaggtccaacgaggttgatagttctcataggagaaaataaatagttgctgattaaatttaaagggcactggtggttaaggtcaaagctgggctgactctggtttcctggtcaagagctccgtctcactaatccctgctgttcccctgtgattgccacctggcttctactgaggaaatacagattagctggaaagccaagctctgagccacgtgggctctgctcatgtgtgatcaagacaggcctgggcctcaggtcccctgaagctcactgttctgtccaccacaccaccagcctctgagcaagaagtagatagggaaactgaggcaccccgaagtgagggacaaggagggtggcttcccacaaagaatactagcaccaagccaattgtgggctccacccgcttgtgcttcgttcattcagcctggccatgtgggtttttataatatctgcttttgcaatataaactatgcacatcgatatacacaaacggccataacaccacattgcaaattacaaagcaaaacgcatgaactctcaaggatggatttttaaatttccttgataaggctggggcttatggaaaagtgcccattcccgtctgtagtccattgctttcaatttaactaggcgtttggggctggaatcgttttttcctcccctttcagtcttggagcgagtcccacagctaggcttcctgcgctcagctgtttgtttttcttccttggagagggactggggaatgttacccaccaagccccgtgggactggccagtttgaagagctctccaggcccctagctgctcaaatcccaaacacatggaaccgggccacacccttcggcccagtggacagaaaggctggcctggcggtcctgacctgccggtggaacggcccagccccaggccctgccgcctttgtatttgatggaagagaagataggggaaggggaaggaaggctccagctcgtggctcccagccaggtcctgagacttcagttgtgaaagctgagctggggcctccctgcctccctcccagagggcccatatatcttgtggccttgggtgtggccaaggctgagtctgagtaattgcttgcctggagcagccagaccctcccctaagtcaccgccctcaccctggggaggaggcctgcaacccagcccgaggccaaatctgtcctccacccccgaccccacccagctcccctcctcagttaccttttagaattttctttattctggtgaaatacacagaacataatatttatcattttaaccatttttaagtgtaagggtcagtgacattaagcatgtttacattgccgtgcaaccatcgccaccacccactagcagaactcttcatatctccaagctgaaactgcatccactagacctgaactcctcattcccccagcccctggcaacccccattctactttctgtctctatggatttgtcttctcttggggacctcatatcagtggaatcagacagtgtttgtctatcatgtttttattttatcttttcactctgtcacctagactggagtacagtggcgtgatctcagctcactgcaacctctgcctcccgggttcaagcaattctcctgcctcagtctcccaagtagctgggatcacaggcatgtgccaccatgcctgacttttttttttttttttttttagtagagacacggtttcgccatgttcaggctggtctcggacttgggcctcccaaagtgctgggattacaggcgtgagcctttatgactggtttatttcacttagcgtaatgttctcaaagttcatccaggttgaagcaggggtcagaatttccttcctttgtaaggctaaatactatttcattgcttggctagaccacattctgcttatccatccatctgtcagtggacatttgggttgctcccatctttcggctgctgtgaataatactgctatgaacatgggtgttcaggtatctgttcaagcccttgctttcaattcttttgggcttgtacccagaagcagaatctcttgccctttggatttttaagccaatttgcccttggaagtccaacagaggctgggtgcagtcgctcatgcctgtaatcccagcactttgggagcccaaggcaggtggatcacctgaggtcaggagttcgagaccagcctggccaacacggcgaaaccctgtctctactaaaaatacaaaaggtagccggacgtggtagtgcatacctatagtcccagctcctcgggagactgaagtaggagaatcacttgaacttgggaggcagaggttgcagtgatccaaagccacactactgcactccagcctgggtgacagagcgagactccctctcaaaaaaaaaaaaaaagcccaacaggatattctgaccacctgggatctctgttcgctaggagagacagaagaaactgaaggagaacagtgaaaaaaaacaaaagctaaggggatcatgaattcagtcattctgcaggatctcagttcaacgagtttgctaaaacagaaatcagggaggggtgggttgttatttgaaatgcagatgcccaaggcccaccccttcctaaatcagaaaggggggcattccactcactgggatgaagagggcaaaggaggcctcgtcagattctctctggccctgggcacacttggtggtgcctacaatgacccataatccactgtgcctggggctcctggtcctacccttagatagagccaaattagccctggctggctgggttgtctcttacagtctgtattagtttgctgaggctgccataacaaaataccgcagcctgcatggcttaaacaatagatgtagttactttctctcaggaaggctgcaagtccaagatcaaggtgctaacagggctggtttcctttgagtcctctctctatccgtggttgattgaatttgagaatgtgaaaccagcaaatacaggaggtccaatgaagggacctgagcatctgaggattttctgtgggggatcctggagccaatcccttcagagaagaaggctgcactcataattccactcctctaaagtcagttgttttcacgaatcctggttttcttttaatcctttgtgtgtatgtgcttgcttcctgtgatagcgtatgcatgtcccacattgttacatggcagacttcatggttgtcatttttagagcttcattaaagttcatctggttaatgtaccatgatttaattgttcctaattgctcatccacgacttctctaggttttcactgctacaaataagagagtgataaatttctcactgctgtagcatttcccttcttttgggttacttcttaaattcccaggagagagactattttgcaaaggatgtgaacatttttatggctattgatactttttgccaaattgccttccaaaaatatttgcacagtcatcagcaatgtttaaacacactagcgttcaccacggtcttgccagcatgatgtagcactgttccattacttttagagatttccttttttaaaatttgcatttctttgatagctaataatctcatcaagctttccatacatttgattattcattgtgtcatctcttaaggagactggctgtttaagccttttgcctggttactatgtgaggtcaaatcaggcatttataaagtgtctaatacatactcactaccatggggtgctatagggggaccaaggaagtataagacctggttcttatcttccagaaggctatgattgacactcacatcttatttacttgttgttgatttctttgtacccaacctgctgctttgcacaacctgtatgcttcataaatctttatgtagttaaatcccggatgacatgtttgttgtctttgtggttcacagagatcagcactcaatttaaaggaatgcggaatcagaacccaaaataaggctgaaacccagagagatagcttagacctggtcaattaatatggacacacatgaagtagtgccccacaaatggggaagccacggcttgacatcagtttttaaagcaaggttgagggtttgagtttggcaggatgcagtctatgagtcagtgtgtgacatgcctgccaccaaaagctatcgtgatcaaagttacgttcatagagaataagggaggcaccagtattatttggctccatgcaggttagacaactcctcagtgtttccttttttttttttcaatttattattatttttttacagtctcattcccatcacccaggctggagtgcagtgggcacaatcacagctcactgcagcctcttcttcctgaactcagatgatcctcctacctcagcctcctgagtagctggcactacaggcctataccaccacacctggctaattttttgtatttttagtagagatggttttgccatgttgcccaggctggtcttgagctcctgggttcaagtcatccacctgcctcagtttcccagagtactgggattacaagcatgagtcacagcgcctgacctcaattatttttttttgagacaggctctcgctctgtcgcccagacgagtgcagtggcgtgatctcggctcactgcaacctctgcctcccaggttcaaatgattctcccacctcagcctcccaagtatctgggattgcaggcaactgccaccatgcccagctactttttttttttttttctatttttacaaaatggagtttcaccatgttggccaggctggtctcaaactcctgacctcaggtgatccatccaccttggcctcccaaagtgctaggattacaggcatgagccaccatgcctggtcttaattttttattttttaaaaaatgttaaacctacagagaagttggaagctataaagagtgctatatacccttcattttaatattgttaacattttatgccatttgcgtgtacctgctctctcttctcgccccacgtttgttattaccatttttaatttttgtggaaccatttgacagtgagttgcaaacttcacccctaaatatgttagtgtgtatttacaagaacaaggacattgtcttatatcaccactatacaattactgaattcaagaaatctaatgctgattataaatacagtatatccatatttaattttcttccgttgctccaagaatgtcctttataaccatttttaaaactcctgatgcaggatccaatccagaatatacatgtggttttcatggctccatagtcttttctagatgggttccttgcctttcactgtatttcatgacatggacattttaaagaatgcaggccagttgcttgctatcctgtcctttaacttgggtttgtttaattgttttcccatgattgacgtaggttaaaccttcttggcagtaacactttctaagtcatttgaggaggtggattgtgtcaatttgttcctgtactggtaatggtaaatttggttaaggtaaatttggtcagaataatctactgtaaagctatcttttattccctctgattaagaagtgatctgtggggagacactctgaggctgtgtaaatacactgattgccagcaatccttcactccatgattttagcatccacttacaattcttgcccgagtcagttattacaaaggtggtcatcaaatgtggcttttctaaccctcttcattgctgttttcctctctgaccgctgcaatgtaaggtggctgcagacagtggtgtgctggtcagctctgattacgtgcgtcttttcctaactccgtagtcaatgatgtcatgttggtagcttgaagtcggtcatagtgggatatttacacctcaaacattggcaagcaccacagcttaggcttctccccaaccccttggagaaccagttgttaaacatttatcagcataccgctggatgcatttaagctaaaacacattcaggaaagaatgactttggcaataaagggactttataattatttttagtcagagtctcactcccgtcacccaggctggagtgcagtgctcactgcagcctccatttcccaggctcaggtgatcctcccacctcagcctccggaatagctaggactacaggctcacaccaccatgcctggtttgtaaaaacacaagctttttgtatttttagtagagacagggttttgccatgttggcaaaggaaaccttaaggaaaggggatccatcttcaaatatttagagggctatcttgtggggtaccctcattagttaggatgcaacctcctaacacaccccacccttccaacctcttggtgcttctatgttggatggctccttcaaggcatcacaggactgcacctctcccaccactggcttcctatcaaggagccagcagggaacagaatggaacacagagggtgcaggtcaccttgagcaggaagagggatgcttcttactctcatctgagaagaagcagtgtgtttgcagaactatggtgaggtgcagaggaggtggcattcatgctaaatgatgcagaggagatggtgttcttgctaaatggctttcatgttcttggtaaagtggatatagttacttccaagaatgagagaggcaaagcaggcttcagcattaagaagcatgaagatgctttgagatagcagcaaagggcatttttttttccagccctccaacccactcaaggcagcccaactccaggatgttcaagcagcacaagaaagggccaagtcagcgtaacacttctgcagtaccgtgcagcccgagagttaaagtggggaaggaagtggacgcaggtgctcagagttcaccactgatgtatacaaaagttgataaactctcccagaggccggggcatcggaaggcagctctggatccaggcatggcagtgatccgggcatggccagaggagggcaggtggagaaggtcaaggggctgggatcaacctgccagttgaagcaatgggcagctttcctaacagtgagagagctggcaggcttggtggtggtggttggaaagtgagagaacagcgttctggatctctttggaaagtatcaagcaactacctagttctagggagagcagtagtgggggccaccatcgtgaagagggtgaaaagctgtgcgttccagcagccagaaagtcacaatcatagggaggaggtgggataaaggcacgtggaacatactctgacttggggctgcaagactcagtctcgaggcctggctgtcactggctaatggtggaaaagctatttcttgctggcctcagctcttcatctcatgtgaatgggggctgggcgcagtggctcacacctgtaatcctggcactatgggaggccgaggtgggtagatcacctggggtcaggagttcaagaccagcctgggcaacatggcaaaaccctgtctcttctaaaaatacaaaaaaattagcagagtgtgaaggtgcacgcctgtaatcccagctactcaggaggctgaggcaggagaatcacttgaatccgggaggcagaggttgcagtgagccgagatcacatcactgccctccagcctgggtgacagagtaagattctgcctcaaaataataataataataataataataataataataataataatgatgatgtaaatggggattaaatgttggtcaagagtacaaaatgagatgatgtccacagcagtgctttgtgaaatgtaaagctctatacatctgtttggagttcctctataaatattaatgcctacaaatctgagaatgagtgtaggaaggggaggtgcagggtgtgcatggaaaggatgttaataacaacaccgagagtttgaatttgaataggactttgcagtatatgtggggttttcttcccatctatttgattttctcaaatgagataatatctgcataacacaaagcacagtgctgggcctgtagtaagtgctcaattagagttcattcttttcttgagtcctcacacaaccccatgaggtagacgttattaattccattttaaggtcaaaagtgagagactcagaaagacaaattcccatgtccaagagtatgtatcagcatagcgggtagtggtcaggactcaaacccaggcctctggactccaaggtcaacattcctttctttctaatctaactaactgtgtctaaggacccaaccaattctcagagtctattctaaatctaaattgattccattctatttagaatctattctgaattataaaatctgcttcctctatatcatctacacttcacacaaagctgccagcttttgaaacatggtaaatataagacgtattgtgggttttttttttaactatatgatgttaaaagttatcatcagaatttttctcttttgtagaaaagactctgaatccccataaaatcatattgtgattgatgattgtcactagcaaaatttcataggagtgttttgtaagattaaatatttttgcaatcctgaagatatccaaccaatctaataatgcaaaatactctaggcccaattaatctttcaaagtaactcttgctctcagtgttagtgtttttaattgggaaaaccctccctgtttgggtgaaatgccttttgcattatggtcagtgatgatttggatggatggatggatggatggatggatggatggatggatggacagatggttgggtgggtggatgggcagatgggtgggtgggtggatgggcagatggttgggtgggtggatagatggacagatgggtggacaaatggatggatggacaaatggatgggtgggtgggtgggtggatggatgaatggatgggtgggtgagtgggtacctaattctgacttcctatacagcagagtagatatagtagaaaaagatgtgaactgggttttgagaaatatgcatacaagccctgatttcatcaccaataatctaggtgatctgagacatttcacatcacattttccagcctttgtttcctcacatgaaaatggtaagtaaattattattaaggtcacttttggctcaaagtgtccacgatcttactgcactgtgagtccaccttttaaagaacagtgacgtgagaaatttgacacttgggctccaaaccttatgttctgagagaggaaacccaataaaggcctagattcctggcaagtgggactcagatttctcacatgcttactcgtgagaataatttccagcctccttaaaatactttatgaccggctcaacaagtgaagaaagacgaatttgagaaaatcaccagtggggagagcttatgctgctccaaccgaaagctatgtggagcccctgggggaatgatggtgagctgtttgaaaacaagcacttatggaacaaattgtccagaaagatagaagcagagaaacatgcttgccgccctcactgatttcagattacagcctcatgggactgtggccaggaggcagactggagaaaaatacaggaggggcctctaacgcaacctagggagtctcttgctagggcaagagggacagattgtggtggagtagaaagaggcagatagtctggggctccaattctggatttaacattcactagcagtgttatcttgagtaagccacctgatctctctaagcttcatctgtaaaactggacatatgaatagcaacctcagaggatcccatgaaacataatacatgcagtccccagcccattgcctggcactgagtagactcccacgaatattagcttcctttcttcttccatccagttaggtggatgggccattgggttagtcatctcatctgtatctctgtctagctgcgtgacccaggacaagaggcttcttgtttccttacctataaaatatggaggggcatcacagtggttgccagggtctcttacaggcctgacattgctactctctggtctaattcctgctgagactggcagtacacatctgtggcctggaagagcaaggacaagagtccatggtgggggacatgcaaaagtcagagctcactcattgacctggaggttgaaacaatgatgctggactgacagccaggttgtccacaccacgtgaacacagcccccagctctgacccagccacttgcactggtcatctctttagagcctgcaagttaatgtcccaatatccctgaccacggggcccagccattcatgagcagggagaaggggcatggtgtttggggtggtggagtgcaaaaagtccctgtcatatacatttaatgttcaagttgatgcaagtatcttgcctgcagatccaaaaccctaagtttctccacaacatctgtctctgaagactactataaaactttaaaaattcatacatgtgtcagatattctgtgtatggtataaagtggccaacatagtgcctgacaatcagtaggtgctgaatgaatgaaagccccctccaccgttaatcaggcaggacccacttattccataaacagagaatatctctgcaagaagtattgaaatgatctcatgttttttcttcataaagtttagaccacttattcgtgtttaagaaatatatatatataaatggtcagtttgctggctcagtgatgaaatgaggttccagaaaggagttactagtttacgatgggtgggtgctacatttatataaaagggtgtgtacaaagtgaaatccagcaagctggatttttttcctctttaattttcacatagattaaaaactgctggagataaggtcaactctgggctgtagaagagcagcctcacgcccatctctctccgtgtactgattcattgtaggcagaggctttcctgcattgcctgtcgatgaggattttcccttaaatgcaaagaaaggggtctgggaaagtcagtgaacatcgactacagggcaagtcatttatctctaaacaggcatgtgaggtttgagaacacagtctaaatttgtcagatagggttttatttcttcacagacatatttgattagtgagtctttgagggcccctttctagaaataactgcaagaaaacaccaacaaaccccatgaaagtatggagaagattccccacaagatttttttttattatagttacaatcccacaccaataaattcaccttcaaacatttttaagtacacagttcagaagtgataagtatattcacattgctgtgccccacaggacattttaagtttctaaactgaatcatcagaccctgcacgtgtgttagccaagggtggcatcagtgatttgaggaagcgcttggttctagaagcaccccatggcctgggctcattgtaggctcttctgagtgggctgggacagtatcgcctaatgacaagaccacagcttggaaatgggcacccgccgttactgcccaccccaacttctttccagttcatctttaggaagagccctccctaaccgctagttatggactgaattgtgtctcctccaaatccacacgtggaagccctatccccaccccgtgcctcagcatgtgactgtatttggagataggaactttaaagaggtgactaagtgaaaatgaggccattagggtgagccctgatccgatatgaccagtgtccttataggaagaggagataaggacacacaggaaaatgccagggatgtgtttgcacagaggaagcactgtgggagggcaagagagaaggcagccatctacgagccaaggagagaggcctcaggagaagccagccctgccaacccctggagctcagactgccagcctccagaactgtgagaacataaaagtctgtagcggaagccacccagtctgtggtattttgtgatggcggcctgggatttctatggaaatcagagccggagccagggccttggaagttcttggtgagaaggggtcctgagcagcaggagtcagggacttagagagagtgaaatcaggaaggaggaaaagcaaatgccagcatgtgtcctggagttggtccccactgtggcaactggggcctcatgcccccaggacccaggagctgtgcagcaggggcctgagttgtctggggagagcgcttacctgcccactcctgtccccggggatcgggacttcccagagggtgaaggtcatgcataggtgagtcccaggttggtcccaggattctgagaagtcccacacgtgctaggggcaggaagcaggaggttggaggtatagctggggtgagccctgccgggttacacctcctggaacttggtttttcctttgcaaccattcactttatactactacagtatttcactactatctactgatcacctaccaggtgcaaggttctgtgttagctgctatgttactcaaaagagcaagtctcgaatgctacttataaatttgcaaagactgagtttcattaaaactcttggttttctggcagtgctggtaatgatttcagacactctagcctccaaaatgggaatccgggaatattctcaataggaggcttttgatttagaattcatcttggatcccatttgcacagtaaacagcagtaaggtgtcacagactctgcctagaccaccaatagggaatgctagggccagggcacaaagtagccagccccgcctctgggcacagtaataaatacattggtgggttttttcttccttttaagttctgacaggccatcctaatatggaaatccgtgaccatcagctggccactgcacggtgtgtgttccatgcttccgcggattcagttagtgctcaccagtgtgccagagacagggtttatttgcagatgatgggcatctgggttgcagccaatccaccattccagtgggtgaagcatccccacctttttttttttttttttttaatggagacacagtctttctctctcacccaggctggagtgcagtggtgtgatctcggctcactgcaacctctgcctcccgggttcaagcgattctcctgcctcagcctcccgaatagctggaattacaggcatgtgccaccacgcctggctaatttttgtatttttagtagagatgggttttcgccatattgaccaggctggtctcaaactcctgacctcaagtgatctgcctgcttcatcctttgctttgtttgttggaccctgcctgtaagacctagaattggccactctccttgtcctactggtctctgaagtgaccagggccagctcagggaggcattcaggataccatacctatgtaggcaaccatgttgccctagagcccccagcggatgagtctccagatggcacttgcattgaacatcatgggtcacctgtgcagagaaggaaagtctctctggttctttctcaaaggggtctcctgccgctccaagctacagctgaaagctctgggctcctcctaattctgggcaggggctggcggggcataggcatctgggagaagtcagcctgcagcctgtaaatatttatcttatgtttcctgctgagctaggaaccagggcatgtggttctttaaaaaggaaaaataaaaagggcttatcgaaaaattaccaatgtgctgccctcctccctgggtactaatgaatgtccccaggacctccccttcctcggtcttcacttctcctgccttggcccttccccatggctccacgcagcccagagcaggcagtatttgtttgaatgacccacttaccctgctctccccctatctgctgggaatgggtggggccaacagcctggtcctagaatccagacgtgtcattgttggcccagggatctgggagtgctcccgggtcctctggcctggctgggcagtgctgagatcctgagccctctcccgctccctgggtctcagccttcccattcctttgtgcctctggccccaggattgacttttctgctttggtgctgtcaccctgcttgctcttagcagctcttctctgggagcctagaccctagagacctgctcccagactccagactagaggctggatgttctcactccacagatggtctttatgggtgacacctacctggctcaagactcttgtgctccaaccacccattgagaccccattctcttgtcttgctaacccccctgttggccatttctccatctccactaagcagcctgggttgcgatgctgtgacctcttctttaatgacactggtctcctgcccaggcctgttccttgagtcaagagaaactgccaagctttggatacctgttttagtttcccgaggctgcctaacaaattaccaccaatgagacagcttaaaacaatagaattgtactgtctcccgggtcagaatgctagaaatcagaacttggatatcagcagccttggttgcttctggaggttcagggagaatcgatttcctgcatcctagctagcttctggaggctgctgacaatctgtcagtacagactccagttgtcaacattcccttaagaggtggtacttgatcaaaatgaagttttccaaggtgtgaacagactggacaaagtatgatggaagggtcacctccttcatgctggccgtgagacttctagtaagatggcccaaactgggccctgggcagcttcatcaggactttgcagactttagccattggcttgggcctatgcagtctttggtaaactgaatatctctcccattttggagatgaaaagactgaggccagaggagtataagtgaccttcctaatgccatgcctcctgccccctgctccaggggttcatgccactgctccactctggaagattaactgaagagtggttaatgcaaggaagagctctgggggagatgaatccatgacccagtcacagcccaggtaaccacaggaattgcccactggagaaatcatcatcagccaggatctgattctagaaccagtgtgtctgtccaatcatggaccccgattgggtgacaagtattgagacagggctgctggagaatggaaagcctgataatttcctgtaatctcttctcatgatgcccctggagctccaagagacaccacagcttatcagaagttgtgagaacactctgagttttataagttctggttttcaaactgggagcttaagtgaaacagtgcgacctcccaggtcgaaatcccagggctgattcaaggccgcatttgcctgggaacaagaccctgaagtgggcaattttcttccttgcctctgtcttcctagctctcctagcccttcctttcttctgcaggcatccctatccccagctggtcctctgcaccctgggaggtccccaggcctgcccatcagctgccttctcagcacctaccagctctaagccctgcttcctgtgcaggaaactggaccgaaatttggttccatatggggacagctgacaatcagctgccctttcccagagagttcattttattgctgtttattacacaaccaatattcacataaatccaaatgaaatgagaaaattcttccaccatcccacaacagagcatactagcttcctttttcattttcttttgctagctccatccgtatgcatacccaattcttacaattcaatttctgggttttttcccctacttactatttcataagcattttcccaacttctccctgtcttttataattatgattttgatgactgcctaagagtccctcaaggggacacatttaatttacccattctcttgctcctcagtcttttttcaatcatgataaataaacagagaaaggtttcccctgttttgaaaattttcctaataataaatttccagaacctgaattaggtcaaaaaacatggacattttatgacttaaatatttcagccaaattactttccaaaaaagttatataagtttatatttatgttatagattttaaaatgggccccacagtgcactcaccacatgaatctcatgaatctgccctgttgtctcttttttttttttttttaagatggagtctcactctgtcacccaggctgctgtgcagtggcatgatcttggctcactgcaacctctacctcccaagttcaagcaattctcctgcctcagcctcctgagtagctgggaccacaggtgtgcgccaccacagctggctaacttttgtattttttgtagaggcggggcttcacaatgttagtcaggctggtctcgaactcctgaccttaggtggttcacccgcctcagcctcctaaagtgctaggattacaggcgtgagccactgtgcccagctgaatctgccctgttctaaccacttgtcactgtctaatattttgaaagagtagattacatctgctagtcctaaaaatcaacgcctgcagcccaagagggcagcaggaacccatcctgctaaccagggatgttaaaggaccctgctatgggctgaactgtatcccactaaaattcacatgttgaatccctaacccccaatgtgactgtatttggaggcagggcctttaaggaggtttctaaggttaaagtaggtcataagggagggccctgatcccataggactgctgtccttataagaatcagaagggacggccaagcgccgtggctgacgcctgtaatcccagcattttgggaggccgagatgggcggatcatctgaggtcaggagttcgagcccaccctggccaatatgatgaaaccctgtctctactaaaaatacaaaaaaattagccggctatggtggcaggtgcctgtaatcccagctactggggaggctgaggcaggagaatcacttgaacccaggaggcggaggttgcagtgagccgagattgcgccattgccctccagcctgggcaacaagagcgaaactccatgtcttaaaaaaagaaaatgaaagaatcagaagggacaccaagaggaaaggttatgggaggatacagcaagaaggtgtcctgcgagccaggaggagaggcctcaggagacaccagcctggtggcaccttgatctcagacttctagcctctgtaactgcaaaaccataaacgtttgttgtttaagccacccggtctgtggtatcctattacagcagccggagaggactaatacagggtccccctggaattgcttatttgcttattcagagttgctatctgagtcacagaagatcgacagtagttagttttttatcaggaccagcttcgtaatttgcagggctccatgcacagcaaaaatgcaaggttctcaggctgggcatggtggctcatacctgtaatctcaggactttgggaggacaaggtgggcagattgcttgagtctaggagttcaagacaagcctgagcaatatggtgaaaccccatctctacacaaaatgcaaaatttagctgggtgtggtggtgcacgcctgtagtcccagctactaagcagtctgaggtaggaggatctcttgagcccagaaaagttgaggttgcagtgagccgagatgacgccactgcactccagcctgggtgacagagtgagagtccatcgtaaaataaaataaaaataaaagaattaaaaatgcacggttctttggccgggtgcggtggctcacacctgtaatcccagcactttgggaggccgaggcgagtggatcacttaaggttagaagttcaagaccagcctagccaacatggtggaacgcgtctctactgaaaatacaaaaattagccaggcgtggtggcgtgtgcatgtagtcccagctactctggaggcagtagaattgcttgaacctgggaggcagaggttgcagtgagctgagatcgcacccctgcactgcctgggtgacagagcgagactctgtgtaaaataaataaataaataaaaatgcaaggttctttgtccaaaaagcaggaaaaaagctgtttccttgctgccatggtctctttcaaccagtcactgttgttctttctcaggtacagggacactcatgagtcagagtcaagatacttataggtgcctagagccctatcctatgactcatcacacataccaggcctgaccctgaccattgccactggggatagagaggaggggtgaggcactgggtggctggaccccattctggggtggcgagggggtggtgggaggtgggactgcacctaagccaggggtccacatccccagcacaggcttcattgtgccttaggacttccctgagaaaacacaaattcagagataaattcatcaccagtttcagaagagcgacagcagagaattaaacccccagcatggggccccgtgtgactgcactggtcacacaccctgagtgcaggccctggttttctcctgcatcccagggtcagggaaaccctaattgtttcctgtgcacagcacttgaagtgctagagctctactgataacttctttcttgcagattctgaatgaatattatgttctgcttttaaatgaattttccattaaagtcacatgaatccagacctcagtaaatgcaacccagttttgcctgccacctgaaggaaggcccctccctttttctcggcacttgtattgatatgcttgctgtgcagtggcgttccgtcccatcccttctgacactctgccctagatgtgatgctctgtgaagtctgatactcaccttccttccttctttccgtgtcattagcctaaagagaaggcaggacttgaacacagggcaagagaagagacatgggcttggagctgcttcctactagcagggtggccttgagctatgtattagtccattttcacgctgcacgtaaagacatacccaagactgggcaatttacaaaagaaagaagtttaggctgggcgcggtggctcacgcctgtaatcccagcactttgggtggccgaggggggcggatcacctgaggtccggagttcgagaccagcctgaccaacatggagaaaccctgtctctactaaaaatacaaaattagccgggcatggtggcgcatgcctgtaatcccagctactccggaggctgaggcaggataatggcttgaacccaggaggcggaggttgctgtgagccgagatcgcgccattgcactccagcctgggcaacaagaatgaaactccgtctcaaaaaaaaaaaaagaagtttaatagactcacagttccacatggctggggaggcttcacaatcatggcagaaggtgaaaggcacgtctcacatggcagcagacaagagaagttgtgcagggaaactcccctttataaaaccatcagatctcgtgagacttattcactgtcatgagaaaagcacgagaaagaccgttccccatgattcaattaccttgcaccgtgtgcctcccacaacacatggaaattgtgggagatacaattcaagatgagatttgggtggggacacaggaaaaccatatcaagctagttactgaattgctgtggtttgggttatttcacctgtgaagcggtgatactatctgcctgcaggactgggggggaccataccatgggattgtagggcatttggcaatttgcactctgccattgcttcctagaaagaaagaggggagattctccatgctgttttgtgtgagggaggagagtggtaggcagcagggcttttggagattgagcattctgagcctgcctgagctctgccaccttcttgagtttctccatctgaaaatgggcataacaattctacattgtaagtgtgctgggaagagtaaaggaagcaacttctaataagagactatagccaagtttggcatacagtaggtgattaataaatgtcatctcctttcctgctccgcctgcttggagtttgccttgtgactgaccatcccagcagtaggtttggaggacagggtaagggacagatggcacaaattcaccccaatttcattcttcaggcaatctcctgacttcctgagcctctcttttctcatccttaaatgagattcagcatacttgctcccctacctcccaggttagtcagcttgaaaattaagtgaggcaatggatgcagaattctttgcaaagataaagggttatgattcacaccagtgcccaaggtttaggtcactaaatctcaaataggacccttagcttccttcttccctcccatacacatgtacctacccagctggcactgtagggacacctgatgtattgggggaaggcagcctatctggttggatcacatatggaccatcctgaccttatgccatttttttcatggacataaaggacaattagagaagagggagcaggcttggggtgggctgtgggtggggaggcagtgctgtgcagatgagaaggtcgcagtggatgtgcaggggcaagccacctagctcaggccggggcctgcagcagacatgaatacattaatcatagattattacactactatgctaataacattcattagtattcagtaatcaatattgagtcagagtcttaatttgaatctctacatggtttctgccacacagcctgaccccagcctaggtttatcatgaggaactcactcccttcaaagcttattttataggagtgtctctgaccattaaaaagtgtgttcttggccaggcctggtggctcacgcctgtaatcccagcactttgggaggcctaggtgggtcaggagtttgagaacagcctggccaacgtggcgaaaccccatccctactaaaaatacaaaaactagccgggtgtggtggtgggtgcctgtagtcctaactactcaggaggctgaggtaggagaattgcttgaacccaggaggtggaggttgcagtgagccgagatcatgccactccactccagcctgagcaacaaagcaaaactctgtctcaataaagaaagaaagaaaaaaaaagaaaagaaaaagagaaagaaagacagacaagtgtgttctccgtgtccaccctttcagcagtttggcaaagtggggcaagagctggggactctggaaccaaactgcagagcccatgatcagtcaccacggtatactgtccatgagaccttgtgagttactgaacctctgtgtgcctcagtttcctcatttgaactatgaggatcctaacaatacttatagggttataataggattaagtgtattaatatgggaagcacttagaacagtgcttggcacatactcagggaaagccacttggtattacactgttctatgatctgctttcccatttgtgaaagtataaaagttgaagaataattaaaacacatttaaagtaggccaggcagagagataaatgagctgtttgcataaacatgaattaagagagtcacactcaactaagaattattccctgttgaggacagcaaacatctggaaggaattaaatgaggaaagaggctgggtggtggtggtgtgtaagcagagaacacgctctgactgttggaaggacataattctcttctgggatgtgcaaatgatcccaaaaaaggaggctgccctacgcaagttgatgcccaaagaatatttatccccaaataatttttgttctgattagccccggtacctgaagtatcttattcctatgagctgatgcatcaccttgaaaaggccgcttctaaaatgcaaatagactcacataaaaataatgttaccattttatatctgtgaaattcacaacatgaaaattgtaatactcagtgcagtgagattgcactgaactcggcacattttaaaatctgtaatgtaaatgtaaattagtataactttttttgagaagtagttcggctggaatttttaagagtcataaaaatgtccatgccttttgacctactaatccagcttctggaaatttattattaggaaaaatttcaaagggaaggggaggaacctttctgcgtttatttaccatgattgaaaaaaaggattcaacagtaagagaatgggtaaattaaatgtgtcctcttgagggacttataggcagtcatcaaaatcataattataaaacagaggataaaaaatgcttataaaatgattacaatataataataatattaggtgggaaaaaacccagaaatcaaattataaagattgaatatgcatatgaacagagttagaaaaacaaaatgaaaccagtgtgctctgttgtgggacactggaagaattttcccttgtttaggtttatgtgactatttgttgtgcaatgaacagcaataaaagacccaaatgaactctctgggaaggggtggatgattgtcagccgtccccatatggaccaagtttcagtccagtttcctgctcagggagcagggcccagagctggtaagtgaggaggcagccgatgagcaggccttgggacctcccagggtgcagaggactagctgggcttagggacccccacagagggaaggaggggctaggagagctggggaagacagaggtaaggaagaaaattgtccacttcagggtcttggccctcggcagatgtgtccttgaatcggccctggggcttcagtctgggaggttgccctgttactcttagtcactcaaggtcccagtttgaaaaccagaactcaagatcccagtttgagaaccaaaactggaactgttctcacaacttctgataagctgtggtgcctcttggagctccagggacatcatgagaagagactgacatgaaattatcaggctttttattctccaacagccctgtctcaatacgtggccagctccagcctacatcccaagagatctaaatgcatatctggcacaaacctctcagaacctctcagattcttacctctcaggttttcttacctgaaagaaacctctcaggattctcaccatctcacacttgagatcaaactgcactaaataaatcccataggaaatagttaaggtctagattatacggcagtgtttgtgatcctctgagagcatcttctattaatttattttatttattaattttttattatacttgaagttctagggtacatgtgcacaacgtgcaggtttgatacaacatgtgccatgttggtttgctgcacacatcaactcatcatttacattaggtatatctcctaatgctatccctcccccagtcccccaccccctgacaggccccggtgtgtgatgttccctgcactgtgtccaagtgatctccttgttcaattcccacctatgagtgagaacatgcagtgtttggttttctgtccttgtgatagtttgctgagaatgatggtttccagctttatccatgtccctgcaaaggacatgaactcatccttttttatggctgcatagtattccatggtgtatatgtgccacattttcttaatccagtctatcattgatggacatttggcttggttccaagtctttgctattgtgagtggtgctgcaataaacatacatgtgcatgttctttatagtagcatgatttataatctttgggtgtatacccagtaatggcactgctgggtcaaatggtatttctagttctagatccttgagggatagccacactgtcttccacgatggttgaactaatttacactcccaccaacagtgtaaaagcattcttatttctccacatcctctccagcatctgttgtttcctgactttttaatgattgccattctaactggcatgagatcatatctcattgtggttctcatttgcatttctctgatggccagtgatgatgagcattttttcacctgtctgttggctgcatagatgtcttcttttgagaagtgtctgttcatatcctttgcccactttttgatggggtggtttgttttttttcttataaatttgtttgagttctttgtagattctggatattagccctttgtcagatgagtagattgcaaaaatgttctcccattctgtaggttgcgtgctcaccctgagcagatcccatttgtctattttggcttttgttgccattgcttttggtgttttagtcatgaagtccttgcccatgcctatgtcctgaatggtattgcctaggttttcttctagggtttttatggttttaggtaacatttaagtctttaatctgtcttgaattaatttttgtataaggtgtaaggaagggatcccgtttcagccttctacatatggctagccagttttcccagcaccatttattaaataggaaatcctttccccatttcttgtttttgtcaggtttgtcaaagatcagatgattgtagatgtgtggtgttatttctgaggcgtctgctctgttccattggtctatatctctgttttggtaccagtaccatgctgttttggttactgtagccttgtagtgtagtttgaagtcaggtagcatgatgcctccagctttgttctttttgcttaggattgtcttggcaaaacgggctcttttttggttccatgtgaactttaaagtagttttttccagttgtgtgaagaaagtcattggtagcttgatggggatggcattgaatctataaattaccttgggcagtatggccattttcacaatattgattcttcctattcacgagcatggaatgttcttccatttgtttgtgtcctcttttattttgttgagcagtggtttgcagttctccttgaagaggtccttcacatcccttgtaagttggattcctaggtattttattctctttgtagcaattgtgaatgggagtatactcatgatttggctttctatttgtctgttattggtgtataggaatgcttgtgatttttgcgcattgattttgtatcctgagagtttgctgaagttgcttatcagcttaaggagattttgggctgagatgatggggttttctaaatatacaatcatgtcatctgcaaacagggacaatttgacttcctcttttcctaattgaatacaaggaggcaaattctaagtctgaacagaatacagaaaattctgacagtcagcactaactgaagatggagagactggtgtaagcaggggtgccaggacccttttgcaatgtgaccttcttagattaaagtgctgggtgggggagaagtcgaggcaaggctccaagaccccttcagccctgtgagcctctgagcctaagctggaatgacttatctcctccagggtggccaccacaaatgccgtgtgcttccagaagcatcactgaaagattgtaacagctgatctttccatggctagagagccctcacaacctatatccctccttctcaatgtgaagttctggatgagaacttattccatctgatttttctcattgtttgaacaagctgtgtaccaagttccccagttacctccaagattttcaaggtggaatttgttctgtgcctcatctgcccccacctcctacctatcccaccaccaggccttatttccctttctgtggtatgcagagcagagtggggaacagccgtggacaggacacaactaacagacaatgagcatccctagacatccccactcaggatttgtagcatacctgagtcagaacagtccacgacctcccaggagatacaaggatgctagattctaacgatgaagacacacatcactgttcttagtattatgcaatagctgcttataaccaagaaaagggaaccctccaagaggaaggggtgggggatcactgggatgggttttttgctgaagaggaaatagaggatctagaagaagaagtagggccgggtgcagtggctcacacctgtaatcccaacactttgggaggccaaggcgggcagatcatgaggtcaagagatcgagaccatcctggccaacatggtgaaaccccatctctattaaaatacaaaaattagctgggagtggtggcatgcacctgtagtcccagctacttgggaggccgaggcaggagaatcacttgaacctgggaggcagaggttgcagtgagccaagattgcaccactgcactccaacctggcgacagcaacagagtgagactctgtctcaaaaaacaaaacaaaacaaaaacagaaaacacaacaaacaaacaacacaaagaagtagaagatgcagagaaggagcatatcaatataaaagcagtcttcattggattgtgtctgtccaatcatggactctgattgggtgacaagtattgagacagggctgttggagaatggaaagcttgataatttcacgtcagtttcttctcatgttgcccctggagctccaggagacactgtggcttatcagaagtcgtgagaacactctgagaacacccagacaggctgttggcacagcacgtgagcagaagggaaagggccccgaactcaggaggccagaaaatagacacggtggccttgagcctggctgagtctgctgccggggtgctcttcctttaggcagtcctggagctgacttgaggggaagcccccaggctctggagcaagcattcttagttaaggtttacttgctgtaaatttttaccctgggcaatgctaatagctctgaaaggggataagaatggtactgtcttagtctgttcaggctgctataacaaaatactgtagactgggtaatttataagcaacaaatgtattgctcatggttctggaggctgggaagtccaagataaaggtgccagcagattcatgtctggtgagggcctgtttctcatggatggtgccttctatgtgtcctcaggtggcaagaagggcaaacagctccctcaaacctcttttaaaaagttgctaatctaatacgcgagggctctgccctcgtgactcaatcacctcctaaagaccccccttactatgactttggtgattaagtttccacattcgaattttggggggcttattcagattgcagcaggtacccaccctctaaagttgagaggataacaccacccaacatcttaagctgacctacatgaaactgctgatatgcaactgcttttcaacattcgcaactggcagtttcctaggggtccactgaattaacctatgatagttacactagaacagcagctcacaaacttgtctgcaccttagaattacttctggatcttctaaaaattccaaagcccaggtaacaccgcataccaattcaatcacaatttctgcaggtgagacacctagccaggtaatctaatgtgcaggcaggtttggggaccactggtttagcacaatacctgggatctagtaaagcgctcagcacaccacctgtgattttattcgtctatcatttattgagcacctactgcatgccaggctctgactgggttcgcctcttgtcacccggggccttcctccccagcggtgctcaagtctcccctcttcctcctccgcagtgtccaggccgcgcagctcccctgacgacctgaaggccctgactcgcaatgtgaaccggctgaatgagagcttccgggacttgcagctgcggctgctgcaggctccgctgcaagcggacctgacggagcaggtgtggaaggtgcaggacgcgctgcagaaccagtcagactcgttgctggcgctggcgggcgcagtgcagcggctggagggcgcgctgtgggggctgcaggcgcaggcggtgcagaccgagcaggcggtggccctgctgcgggaccgcacgggccagcagagcgacacggcgcagctggagctctaccagctgcaggtggagagcaacagtagccagctgctgctgaggcgccacgcgggcctgctggacgggctggcgcgcagggtgggcatcctgggcgaggagctggccgacgtgggcggcgtgctgcgcggcctcaaccacagcctgtcctacgacgtggccctccaccgcacgcggctgcaggacctgcgggtgctggtgagcaacgccagcgaggacacgcgccgcctgcgcctggcgcacgtaggcatggagctgcagctgaagcaggagctggccatgctcaacgcggtcaccgaggacctgcgcctcaaggactgggagcactccatcgcactgcggaacatctccctcgcgaaaggtaccgccaggcccttgctgcctccacccacggccccttctgatggggtcttcctcctgcacgcccctccccaaggacccaggagtaccccagccccaccccatccccaagtgcacttgccattcccagccccatactctctaagtcttgccctacaggactctggaattttctgcccaaatggcatgtacccacatccagggcttgcacaggtctcttcccaggtaaacctccctcgggtagagagcagattcagtggccactcttctagatgtgagagtttgctccagttgtggctaatgggagcctggtggtcagcttgcgtgggtgtgctggagcctccaagagcttgaggctgggggcagaacaactggctcaggccgggagtagagaggggctcctctagtgtcattcccagggtggagatctggagttagagaattccaaacttgaacctggccttctaggctcttaggaagacttactcatttaggcaaaagaacgtatttcattgaacgatcagctggtttcatttgtaactgttttttgtttgtttgtttgttttgtattttgtttttttgttttctgtttttttgagacggagtctcgctctgtagcccaggctggagtgtagtggcttgatctcagctcactgcaagctccacctcccgggttcacgccattctcctgcctcagcctcccaagtagctgggactacaggcgccctgtaactgtttttgttgttgtcgttttgttttctgttttcaagttggggtctggctctgttgcccaggctggggggcagtgatgtgatcatggcagccttgaactcctgggcttaagtgatcctcctgccttagccttccaagtagttaggactacaggtgcacactgccatgccccactacatttttttgtttgtttttttgttttgttttgttttggtttttttttttttgagatggagtctcgctctgtcgctcaggctggagttcagtggcatgatctccctcactgcaacctccacctcccaggttcaagcgattctcctgcctcagacttctgagtagctaggattacaggtgtgtgccaccactcctggctaatttttgtatttttagtagaagacagagtttcaccatgttggccaggctggtctcgaactcctgacctcaggtgatcctcctgcctcagcctcccaaagtactgggattacaggcttgagccactacacctggccagtttttaaaaattattactgttttagagataaggtcttgctatgttgcctaggctggtcttgaacttctggcctcaagtgatcctcccaccttggtttcccaaagtgctgggactatggaatgccagtccatttgtaatcttaactataatggcaaaaatgcaaaaatgtatgggcctccattgtactcgtgctgtgggcccacaaatgatagaaccaagagacccaactccctttcttcactcctgacaaactggtccccttccctcccccaattccttcctgctgcactcaccatcagaaacacctttcatgaaatgcacttctcccacgtcatccccctgctcaaagcccactgtggctccccatggcccactggattcgttagaaattccttagtctgccatcagcacaaataataccattgcgagcatctagtatgtgttacctactgtgccagttgtatctcatgtgggcatcttttgaaaacaatggctctccaagggagtgatgttttccctattttattgacaagcacactgagatttgggaagcttccatagcttgcccacagccgcagggccaggaggtgatggaccagcatttacatgctggcctttctgatcccagagctagtgtgcttcccattgctttcctatcctgtcctgcctgccttctcatccactgcctctcatgctagggggcacagagagaactgctgcagaggccagtgagcaatgtcaaggagtagagactgcaatgtcaggggagtgttaagggttatggcaggtctagcccatttttgccaggctggaaggtggacccaggttgacaaggtctgcctctgtttcaaacgaaaccagaaacatgtgatgttctcgagatatttaattgtttaactcaagggccatacatggtcttgctgtgggtgatgcatccagtctagtggggcacatctcgtcactgccctggaagcacagctcaccttccccactgacagctgtgctccagaggctcctgcacctgcagggccctcctcatcctcctccttcacctcttctcttccttctcctctttctcttcctcctccgtctcttcctcctcctccttctcttctttctctattccctcctcctcctctttcccctcttcctcttcccatccccttcttcctcttcccatccccttcttccttctcctccttttcttccttctcctcctcctcctcttccttctcctcctccacccttctctcctcctcctcccttctctcctcctcctcccttctctcctcctcctcccttctctcctcctcctcccttctctcctcctcctcccttctcccctcctcctcctcttcctcctcctccttctcctcctcctccttcccctccttctcatcttcctcctcctccttcccttcctcctcctctttcttcccctcctccttctccttcttcccctcctccttctcctcttcttctctctcctcttccctttcttccttatccttttccttcccctcctcctcctcctctttctcctcttcctccttctcctccaccctttcttccttctcctcttcctttccctgctcctctttatcctcctcatcttcctccttttcctcctcatcttccttttcctcctcatcttccttttcctcctcatcttccttttcctcctcctcatcttcctcctcctgctccccctcctcttcctcctccttctcctcctcttcttccttctcctctttgtcttccttctttttctcctccttttcctcttcctcctctgccttttcctccttttcctccttttcctctttttcctcctcctcgcccacccaaatcctactgaaccccccccaacctttctagctccctgaagtctccctcttctgagtttctgcatttatcagagtgaaagtataatgatggggccctctgcatcctttccagtttacacagcccttttgttaccctgttttgttttaaaatgggacctgaggagaatctatgaggtggtttaaggcagatgttgtagagggcagggtaggattttggcaggaaaacaactgaggctcagggaggaagtccctgccttactcaaggcctcatggctggtaatgatccaggtttaataaggtgtaatttacatgccatgaaatacccccttttcaggtgtacagttcaatgatcaggacctttaagcccaatgcctggttctcattctgttacccacagtccacctggatctgtatgtctctgtgtcccccagcattaagagtgcagtgcacataactgagactcaatattcgtaaaagcaactgttaaatcttgacactggacgatcagaggcttcccctacccagtttgggttcctggtcctgggtcactttgggccttcacatcccagaaatcaaaggagggaaggaggtagaatttcttcttccaaacacatgcccctgggatcttagcttttcctgtcttctcttttccttgacctcccttgcccctagcagggattagtgttcaggaactaactaatagtattaaataacaattacagtgaattatgacctataatgaggcaggcattttgtagacatgaattctcaaatagacattcaagaccacgaatcctcacatcctgcaaaaaggtcttattgcccactttatagatgagaagactgaatagccttcccactgtttcttagacaactggcaggccgtaaagccaagatctaaattgggtctgcctggtccagaaaccctggttgttgggatggaagcattttgcttccgagctgtaagcagtgaagagaggaaagcgtgttccctgtatttgaggcactttccaggcccttcctcttccaagctagagacgtcaccatgcctcctgctaatgtaccctctcagacctccccagacacttcacatccgggttctttcatttctaagtccaatctccttggctcaaactgaaactgccctgggtcactcatttgccatggttcttctggtgggatcctccatgtagtctttctttggtcctcaaactaagttttacactcagttctgttgaactgaaagtttcatcttagtcctgctttcttgtctttaagctttggattcttgatgggtgtatccatctgttcaggctgccataacaaaatgccatagactgggacatttataagcagcagaggtttattgctcacagttctaggactgggcagtccaaaatccaggggccagcagagttgggccctgttcgggaccagctttctggttgatagttggtgacttcttgctgtgtcctcacttggtgggagggatggggcagctccctggagtcctctttgtaaggatgctgatcccattcacaagggcctcaccctcctgactcatcacttctcaaaggccctgcctccggataccattgccttggtgattaggttgcaacatatgaaatcgggggggatgcaaacactcagatcactgcactggggctcctggctcttcacagttcgacagtgcttgggcctccagctctcattatcaccactgcatctagggtctttcctgcctccctgtctctgttgccaggtgcctggtaattattattaaaaagattcctgctggtatatctgaacgtatttaccatgcagccttaacaggaccaaactctaccctggcttttgaacaagggctaggtcactagaaaagcttccaggcattcccatactgctgtctgcagtggcctttctgccctagctttatctagttcctctattaaggtttttaaacacacacacatccacacctgcatacatacacaaatatacacacacacacatatacgcatacctgcacatatacagacataaacacacatacccatgtgtacacgtttgcacatatacgtatacatatgcacatacaaatgtgcatgtacacacacatgcacatgtatatacatacatatgaacacatatacacatacacatatatgcacatacatatacacatacactcaccacactctcacgctttgctctttcctggctgagaagtcacaaatactcaactatgtgtattttttcaaatatgagcttatttacattattcctgagcttgacccaaatggtttttattctcttactttgttatacagtttttgatgagctttgtctccagtttttctcttgtgaatatctgcagtgggggttctattttctgttttggatttttagcattaatcaggtctgttgaaatctgcctgtgggtttgaaagaagcagagaacttagatcatcacagaggagaaggagcccaggaggggaaaggtaaccagagaggggaggcagcccaggaggggaaaggtaaccagagaggggaggcagcccagaaggggaaacctgaacaaagtcacattcagatggctctctttggcaaggatgcaggttttctggaatcacagcatttggatggagtggcaatacatctgaaatcatccagtccactctttttgttttgtagttgaggatcctgaggccagagaggggagatgattggctgaagtcacaaaaccatccagtgacctggctgggacaaaaaaaatacatctctggattcatgaaaacaagttcgcaaagcagatttgtctgtgggctgatttcgtgagaaaaaacacaatctattagagagtccagttcagcaaatatttataaagggatgacgtcacagagtggggctttggattccaggctaatgctgggactctggtttctgggtagtagggacctgctgaaagtggggaacatctctgagtggagtgacaggtaaagtggcctttctgttctactgagggctgaggagcatggcctgggctgaggtccctgggacgttgtatggtgagccaagctctcatatctccttccacacggactctgctgggaagtgggtggagttgcccccagccccgcccaccaccctccattgggggctcggaggacggtagcaagggcagtcccagcacctttctgggcctgagtctcctcggctgtgaaatggggctgacagtgcctgccttgtccacttctcagggtcacagagagatgccttaaatgatgaaaaaaagagacctcacaattgtaaaggtgataggggctcagaatccaggccctggtgacttgagggtactggaagtggagctgtttgctgagccactctaccctgtcagccggcctgtggttagcatggttctgggggtggttttgactgtactgctggctccaggccaggctcatcagctgtcctcataatttgctcttggcacatcagttcctggattccagcccacacaggtcccctaccccgtcatgtgttctgggatcagggaagggagaaggcatgggtttcccctcattggctgatccccaggaaaaccccggtgcttctcctgaatgcctggtcccagacccttcgtcccactgggaagatgcttctggtgggagcaactgcactgaggggagcatgaggggagtgggctagatgagtggacaaagcctgagcagggaccccaggaccctgctcctccttgtcccagccacctccatgccctggcctgccttggtgacagaaaagatgagaaatgagatggtgtagaaagttgagaagtgaaaaagctaacctgggtacctcttggaacaacagatgtcatggcacttctgctactacacgttagtcattcttcagatcctgattgtttgctgggtgtgtgcaaggcacaggccacagacagtgccctacagaaggttctgtcctccttgggaaccacagttcgaggtgggggatagtgcccagggagtgggcagaggtcacctgaccaggctccgggtgctcccacaggggcattgtgcacgaggatctccccacctccttctagctctgagatttgggggctctgcccatggtacactaagagaccagaagggtgggtgtattcgtctgttctcacactgctaataaagacatacctgagattgggtaatttataaagaaaaagaggtttaatggactcacagtccacatggctgaggaggcctcacaatcatggcaggaggtgaaggaggagcaaaggcacatcttacatggcagcaggcaagagagtgtgtgcagaactcccctttataaaaccatcagacctcatgagacttattcactatcacgagaacagcaagggaaagacccacccccatgattcagttacctcccactgagtccctcccacaacacatgggaattatgggagctacagttcaagatgagatttgggtggggacacagccaaaccaaatcagtgggcatgaaggcagtctcaggactaagagggactggactcttaggatttggctaatgttcagggacactatgaggagagcgtttgtgcagaggtggaggaaagttggtgaccatgagcaccgagctgtaagtttgcagcagaaggggtcagatcgtgagtgatctgcaggggccttgacaggggaagctgcacctgtggtgcagtgaggggccttcccgtgctctgagtccctttggttgctttgttgtttcagagagatggatcagacagcaaggcacacatgggctggagagagacggagacagggaggttcttataaaggccagagccaggccataaggacctgacgagggtggaggcagtgaggaaggaggtggagacatgagaaggaccttcctttatgagaagcctcgaatcacagatgcatgtagctggaaagggatgcaaaagggggacaggaaagaagaatcagagcaggctcaagatttccagcttgggtttctgaagaaaggatagtgtcagtaaacacactaaaaagtcaaatcctgagattgcttcacctacaggcagcatcagtgatttaaagatcacttggtcctcggagcccctggcagctcggcccctcgaggctctggccaaatcatcagcccttctgagtcagccaggcctgtaccacctgaggatgtgatgaaggcttgggaattggtgcccacctttactgcccaccccaccttcttcccagttaatctccagtaaagaccttcataaccacatagttatgtttaaaacaaaatccatctgtagcatgttcttgagccctgcctctccttggatgacccagccaaactccacagggtgatttcaggtgcgcttggaatacccggaagttgtcatcctataatggttctgaggaggtgttatgcaaagtgaggaggcgttatgcagagtgaggtgatcgggatggcccccctcactcaaggctttgaagcccttctctagtcatcatgccactgaatccactcagtcctcactacaactgcacatttaatagaatcagaacttgaacccaagactcaatatccatactcaatgcccaccttccagatgatgtctaccacccagaggccctacatcagggtctttgggcagcatcctcccttggcgagagtgactcctgggaagacccccctgcaggttgcacctgcatctgaggggcaggtgaaattggagggtgcagtcccttgcatctgtgaccagctcagttcctggagcacccggggtggtggaggcagagaggagagaaaggggtgggcatccagcccagcagcagagatctaggtaccctctcccagttccctttgctgcagccttggccttggccttaaggggagatcgctgggaaggggtagtggaacgcatttgcttcctgactccgcccttcgtttctgtgccatctttggtctgtttccaacaggttctctaactcaatcatgtggtctgaaaactgggatcacaaaatctagtccttcttaaatcatctgtattacttgtgaattgaagaattgttgactacttttttccctgcgtgcgtgccatggaattattaaatgtctgtcaagtttggttaggtctgaggacagtgccagtgtgagggagttatcagtacatctcaatcttggctggctgattgttttgtatgtattattaacaccctctgatcttatatactcattcattcatcaaatatttattgtgcaagacgttactgctggactgtgggtctgtgtgtttcgatttcctggggctgccataacaaagcatcataaacttggtggtttaacagaagcttattttctcacagttctggagactcgaagtctgaaatcaaggtatccacagggccacgttccctctgaaagctcagtgggaggacccttccttggcccttcccagctgctggtgcttgctggcaattcttggtgtttcttggcttgggaatgcatcactccaatctctgtctctgttgccacatgtgctctcatatctctgtgtctctgttttcccttcttataaggacaccagccattgcactgaggcctgccctaccccaatataacctcatcttaactaattatgtctgcaaagacactatttccaaataaagtcatattctgaggttcctggtagacgtgaatttaagggggtagggacactataaaggccacttttcatggtcctccttttcttttctttcttctttctttttttttggagacagagttccactcttgtcacccatgttggagtgtaatggcgcaatctcggctcacggcagcctctgcctcccggattcaggcgattctcctgctcagcctccagagtagctgggattacaggcgcccaccaccatgcctggctaatttttgtatttttagtagagacgggatttcaccatgttggccaggccggcctcgaactcctgacctcaggtgatccaccctcctcggcctcccaaagtgctggattacgggcatgagccactacacctggccccatggtccttgttttctcttgaaaagcagcaggaggtgagagcttggagtctgagtcttcacagcaggtatagggatataaagggtatggtcctgtctcaggaagctggcaattttcttaggaaagatgggacacagtcactatgacaagaggacaaggcaggtgagattacttgtcaaatggcaccaagcacatgcattcaagcagctcacactaactttcagcacactgggtcagagaggtttttgcaaggagtgggcagtgagccaccttagagctggtagtgacgaggaggttggcagggagggctcatgggctcactagcttgggaacagcaggtgcgacaatggctggcaagaagattctgcaactgatgagatgtctagccctgtgggtgttgcagagtggacgtgggcaggtcacatgtgggttgaaacaacagctgcctcactcactcgccgcctgtgtggtctcagatgagtaactgcagcacacgccattgtcatggggactgtatccaatcatgtatgacagaatccctgccacatgggagacccagcctggagggcagccccactcgggagagattagaaacccctcttccatccaagtgcaaaagccagacatctgagcatgacgctggcctcttcctccccaactttcaccaaagtcagtctcttctacttcctaagcagcttttgtatgtgtccctgacatccctctgatggccgcactcctcatccaggggtctcacctcccacctggctggactgaaggctctgcctcggcctccctcctgttctcacccagtttccacactgcagcctgagccgtcttcctcatgtgcagatctggttgagctcttctctcaggcacctctgtggcctctggtgccctcaggaggggctgagtccaacactcaggccgggtctctaagagccccactttctcatcccagtgtgtccctcatcttttatcccgctgtggcttactatctctgtcttcattttcagcctttgtagggattgttccctctgcctggaactgtcccttttcactcttagcccaggctgccacaacaaaataccatagactgagctgctgaaacagcaggcatttatttctcacagctctggaggctgaaagtccaggatcagggtgtggcagggctgagttgtggtgaggactctcctcctggtgtgcagactgctgccttcttgctgtgtctgtttgagagagagagagaactccctggtgtctttacttataaaaccactaaccccatgtgggctgacccccgtgacttcatcaaaacctcatcacctcccaaagaccccacctcttaaaactgtcacattggggattagggattccacatatggttttgggaggggacatacatattcagtgtgtgtgtgtccctctcccacccctctgtttacttagctaactcctgtttctctttgagatttcactttggatattacttcttccaggaagactttcctgatgccccccgagactgggctgggggtttcctgtgagtttccaaagctaatgctgccccttcctctcctcagagagggcgttttgtttcctctacagatgacctggtcctgtttcagaagggagccccctaacctcagtgctgtttttgcctttccagggccaccgggacccaaaggtgatcagggggatgaaggaaaggaaggcaggcctggcatccctggattgcctggacttcgaggtaatgagcgtgcccctgggtggtacctgggagagatccccaatccatctctacccgctactttcttgatggtataaatgccagggctccccaggggagtgcccaatcaactccgcctcaaacgctctgttccaacaagagactaagaggttgctggtgtcacggtgggatgcagcgcatacttttccttagcaagtgccacagtctgaaggaaaaggtacaggacaggcctgcagctccctgaagccccttcccagcccaggagccagggtctgtgtgagcagagcatgcagaaggagttggagatgttttgagatccagaccaaccctttgaagatgctgtcccatcagtgtttcctgatcactagctacctgccaccctcccgccccaccatgactcctgctgaccctgcccaggtctacgaatgggtcatgaatacctatcccttcctcttttgacccgtcccctccccatcctgctgcacatagtgacagccctgaagagccagtggctggtgggtagggtactttgggccttctagaaagacaaggttcttcttagactcactgtctcccaagctcccgttgagttccttcattgtaccttgcctgccagtctgtccattcctgagcctgtgctgcttgcaacattttgctgggagactgttgtcttctaagtgatggaagaaaaggaaatagagggaaaaaggtgtctggttatttattttaggaattatacctccaaaccatctgcttcctaaatctctaggatgttgcaaacacagtagaggagacagtgcctggaggaaggaaagctcccagcccagtctctactcctggccctcccctctcagggaacctccctaaagtcagcactgaggctgctcaggggctcatggggctctggaactgcattttctgccctagcgaatcataagatggggagcctggggcacagcttgtgctagatcaataattctgtggcagtggagctgttggactctgggaacagatatgttgtattaggagggaaaaggaggaaacccaatcagctctctccgagaaacctgtcttcttccagccattggaccttcggactagaggagtaattcattactgggagacagatttctctgagtcccagaaaaagcccaaagcaaaccaactcatattccaagcaggaaagaacaattagtcagttaattaagggtgctctgctttgcagagataactacacgcttaggccaggcctcatggggccagggctctcactcggtcaaggacttgtttatgctggctctgcatggcgccggcaccgtcaccgcaggaggtggccaaggggcctcatggccaagagccctggggcttgattggcagcaggccatccatttactgacctcgcctccaatcccttttgctatacctccctgtgtgtatgcaagggaagggatctttttgtgttttttttccttaaataaaacgagaagctactttttcttcttcccaccccgctccctaagtaccagtaagccctgttgatcagcatgaagcgatgctgaccgaccatgaactctcatttcagcaacagcagggctcagatcctgcctccaacactgctgtgtgaccttgggcagttacttaatctctctgagctccgattggctcatttgtctaacacaggcagaataatccctcccaatgtcttgtgatgattaaatgagatactttatgaaaagcatccagagcagggcctggcacgtagaaagcactcaaaaaagtgtttgctgattctaggctggacgcggtggctcacgcctgtaattccaacattttgggaagccgaggcaggcagatcacttgaggacaggagtttgagaccagcctggccaacatggtgaaaccatgtctctattaaaaatacaaatattagctgggcgtggcggcgtgtgcctgtaatcccagttactcgggagggtgaggtgggaggattgcctgaacctaggaggcggaggttgtagtgagccgagatcgtgccactccagcctgggtgacagagcgagactttgtctcaaaaaaaaaaaaaaaaaaaagtgtttgctgattctaagtctccagcatgctgaagggcaaagggacacccccaaaggaataggcacccccaccgtcactcacaacagcactggacctttctagcaggaggatcccaagcctgatggatacaaggtgtgcatgggagggtccatgtggacctctttgactctgctgtggtggcatctttagattaacagaaaaaagccagacacagaggctaagagaggatgcatgggggaggctgagccttgaacccgacgatgacctctgagggtccttcctgttctgcatctgaggctctgccatttgtctgttttctccccaggtctgcccggggagagaggtaccccaggattgcccgggcccaagggcgatgatgggaagctgggggccacaggaccaatgggcatgcgtgggttcaaaggtaataacaatctcagttctccctgagcctcaccaccagtcccaggcagcacatgggcattggcatgggggaccaggactcttatcttcactgtgccacggaccagcggggcaaccttgtacaagtctcttcatcttgttaaagcatttagtttttcctccaaaaactagaaaccctcagccaggtgtggtgactcatgtctgtagttccagcattttgagaggaccaggcaggtggattgcttgagcccaagagccccatctctacaaaatataaaataattagccaagtgtggtggcacttatctgtagtcccagctacttgggaggatgagtgggaaggatctcctgagtccaggagttggaggctatagtgagctatgattgtgccaccaccctgggtgacagagcaagagctcatctctaaaacaaaataaaacacacacacaaaaatctagaaatcctcatgatactatatctcacagggctgtcaggaggagtgagcaagcacgtatgtgtgcaaatgctaaagtccctgtagaaatgcaagggagtgttatggtaggttgcagcccagagatgtaaccagagaaagccaacaaggggcctgcagggcagacaccagggctgcaggcccaggacagccctcctccctagtcctgccagactcctgaccttctatatactcttttattcccccaggatttacaattttaattcaattctcagatttacagtgccaaaaatgttccttctgatttgctcttcttcctgtaggcagtccccttgtttacgttaggggaacctacttttacagtcagtctgtcttttcatgctcgcttcaagattgtctaagcctcgtagcatcactgcggaagacaaggacatctgatgctctttccccaggctttctactcctcacttgttaaaatgaaaactaagaaaaaagtactgctaatcattcccactccatgtctagggtgatctcttgatcttagatcactgagaaattttattttactttctggtcagtgatgaaacaggctgaggttttccttccttttatgatcccattttaaaaagttgattttaaaacagattgtaaaagcagcacatgcttgttgaaaataaaattagagactgggcaaggtggctcatgcctgtaatcctagcgctttgggaggccaaggcaggcagatcacttgaggccaggagttcaagaccagcctggccaatatggcaaaaccccatctctaccaaaaatacaaaacttagccaggcatgttggggcacacctgtgatcccagctacttgggaagctgaggcaggagaatcacttgaacccggggagtggaagttgcagtgagctaagattgcaccactgcactcccgcctgggcctgggtgacagagtgagaccctgtctcaaaaaaaaaaaaaaaaagaaaagaaaagaaaattagacaacacagaagtgcataaagcaaaaagtctccacccctcagttcccccagctcttattctttagaataactactgtcaatgctttggagcacaccctgccagatctttttctgagcatattcctatatatgtatatggctgccttttttttttcccccccccaaatcttggatcatcctgggcattctcccctggaatttgctggcttgattttttcaccagacagcatgcccatgggcttttgattggcagatgtctttctgggggtccttggaatagaagtcccttgtcattttaatgtccagtgagtggtgccaggattttctacttctttgtagagggagatgccagctggccaaacaggtcttctttagccatatcctgggaaggaaatgccacaattccctggtatctcacacttatgttttatggtctctcccacaagaaaacctgctcaacatagaacccgcctctccccctatttaactaaagccccctctcctttgttttcccctgggctcattagaacaaacttggatgtggacctctaaaaccttgagtgtttaataggactatctttgacttgtcttcttcctgcaaaattccatgtgctctttggttctttacaaacgggtgggattttctcactcatgcctcctccttcttggggtacccagggcagatggcagaattggctgccctcttctcctgcctgctgggctctccagttgctgctggctcctgcctgagggtttctctggtctcgagttcatcaatctcctgcaggtaatattttattcacaattaggatttctttccatttctaatgccagtttcctcctctgttttaggtgaccgaggcccaaaaggagagaaaggagagaaaggagacagagctggggatgccagtaaggacattctgctggggccgtgggatatggtgttggcacagggctagctgtcccccaagcagccccataagtttggaggttcagaggctggagccatggctggggctcaagtgtcaaaggaggctccctaccttttttagggctctgctggtctagcaagagatgctgatagaccccaggggcactggccacatttctagaggtgtcataaacctggcggttgtgtgcatggatctggaggcttcccccggtcactcgctagcccagctggtataatctctgtgcctcagtgttctcatctataaaatagggataacaggagtctttaccttataaggtcattgtgaaaattgaatgagttaatctgtgtaaagtgcttatgatcatgctggacacctggtgaggactcagtacctgtttgtgattattattctgtgtaatacacccactcagacacgcttcctaaaatcatcagaggtgcttgcacaaattcagctactgaccttgttaaaggcctcccctccctgggtgttacacagggaaaggtgcagagacaaagtggcatcgcctttgttttccccatttgccactgatggaggagtgacgctggagagcttgcgatccggcagaccaccctgttagtaatgggcatctttctgatgcggtccttgctagaatgttgacaaggggatcagcttatttagttgtgccactcttctaaggtttacttttcccctagagagggctacatgtagaatcttggagacttgccagagaagaatgaacagagtctcctagccaagtttaaaaaggagcaaaagaaaaaacaccaaacccagcatgtggtgttagttggctctgtcccacgtgagggcgcaagcagaatatcactgcctctggcatctaggctccggtcttggctctgggaggatggggcctggggaaagagtccctgtgttaatagcttccccccggacactcagggacaggggccactgcagagtcacaagctggacacagaaaggggtctcatgacacccaaataaatcaaagactatcagccccaccaaaattcaacgcaataccacaacctacagcaccactaataattagccataggcctccataaataggagaaggtttcgaagagaaacctacaaatcctacaaccaaaaggacacttaaaacaaatagagcatatgccattattcccacatgggcgataaccatgactaatgacatgaaaaattattgttgtgcttcaactagaagaacactaatggccaagacctgcaaaacacacccgctaataaaaattattaattactcattcattgatcttcccacaccatctaacatttctatatgatgaaactttggctcacttcttggtgcctgcctaatcctccagatcattacacgattactcttggccatgcagtacacatcagacacttcaactgccttctcttcagttgctcatatcagctgagatgtaaactacagctgaatggtctgctattttcatgcttccttggtctcactaggtccttcagatgagatcaagcacactcaggatggtatggtgcagtaggcccttcacatcacactttagtcccagctgtgcaggaccagaaggagacctcactcccaaaaagaggcctccccaaggccccctgacacttaaacttgcccctgctttctctctgccctgccctcccctccctgaggcatgattcaggatcaaataggagcaaggcaggtgacagcaccttgtccttgaaagtgatggacttgcccgtagaaaaacaaggaaatgcccaggctgatcctggaccccccacactcacctcacctgaagtgctaaagtccacaaggccatctgcgagcttcacagtacttctagcattctctagagtccctttccagggctgcttaactgggtgtgtctgactgaatgaggccatctagtagacctgatctgatcccttttgtctaaagggctgggtcctgaatgctgtcttcggggtgctgtttttccctgctctgtttgttgactggtttctgacagaatgctgccaaggtagctgagaaggatcgtggcatttagttctgagaaataaacaactcctgatgggggtgggcaggaagggaggaactatgtggaaagatggctttgagatcagaaacactgcccgcatgccagaggggctcttgttgggaattctctggtggctcttctttcagcagacttgagagagcaagtgaggaggtcgagccagcagggcgttccccatgctgtggaggatgcgtggtctctattcaccttgctcctgtgggccaggctggtgggctctgtactggggttgggccctgaggccagagctacggtgcagggaggtgagagccagagccacaggggtgcggggctccctggggatgggtggggaggcgtggggggaggccaccccctccacttggccctggagcctcttgactgtacagcaagaggtgacatcagctctggacagcctcccctcagggactgaggctttctttcctgcctcgaagagctacaccctcattgcagcccagaactcagacagaacccagagcctaagcttgcacaaagcgctgaacttttctttcctgccctctgacaagacccccacccccagtagtctccagaggcagtgaaattgggaggtgaaggggctgagcagagacagctccatgaacaggaagctctacacaacatgaggaggactctgggagacccagaggaatcgtagaacaaagaaactgggaggccagcctccatctccccattttcagaggcccataggggaggacggacttcctcacgtccttaggccagggctgaggctgaacaaaatccccagccgctgacttcctgaccctgggatgggggcttcggcccctggtcttgggtagtagggccgggctccttaaaaccccaagtaatcccctctttcactggtagctccagatgcagatgtaaggaccttggggctggaggggaatagttgtcacgattcagggctgaggtctgtgcctgtcccattgcggggtgtcttcccacagcctctgcccaccagcttgctctgaccacaacaacatcaagctgtattcagcctcctgcttatgtttccagggaattccagtcccagaagcattaaccatatccctgagacccgggctctgtgggggagagccaaggctcagctttcagaaaagtgtggaaattctgacagacatggtgcccatgtctgagggtttcttagtcattccctgcgccctgggaagccccaccgtaggatctacggggtgggaaaaaagcgtttgcagcaccggagagctaccctcctccacaagccaacatcgtgcgggaagagccgctaaccagggtggcctctgctaaccccgaggcctttcaaccttcccaaacacctctgaagcccgtgccgttagcagcaaagacctgaagttccagcagatggggatgtaactgtgcaaaagggactggtgagaaaacatgaccgacacccctcactagggacgtggaagttgggggttttccctggaggagggcatgccacagaaggcttctcaggacccatctgagtccacattaaaatatttttcagaacaaaaatcttgccattgtttacccatgttttgatctgaagtcataggattttagggttggatgggtttcagacccattcctctctctcgcccaaccccaccccaccagttttcagaacagagaccaacaacagagagatgagaggaatccccaaaatcacccagcctaggtcacggccaaattgggtctagaatccagatgtcccgatttctgcttgctgagagataaaggtttttttcagtcaagggcaatatcagtcattccgtgacatgtttggcttttgggagtttggccaggaaaaaaaaaaaaaaaaaacccgctacgtatacatatctcaagagagaaatacatttgttttaccctagtagatggtccatttgcaggaaaaataaatagtgtttttgcaactaaggggtgggtgaagaattcaggttttttttaagtcccacagcatgaatttaaagcaggatataagttcagattgtttaaaaaatctttctcaatttggtttcatatggaaaaaaaatatgcagatgacaccagggtgaattctaaaccagagtttgttgatggttatcattcatggcttagagcacttgaaaaatgtttaacacttcgtacatgttttcagtatttagggaagtaagtctggggacgaggggagctgtgggcaccccagcatgcagtgtaaactcagaataaataatcagaggaggaagtttctaaacagttttccctgcagctgctgagatgtttctgtctctgttttacagtcaaggaggcagaatcctttggagtcctcggactcccttctcccatccctgtgcctagactttgctgtaccaggtgcccgggagaatctgtttaggataatggagcaccaaaagttagccttatctcaggcatggagagacacagcgactgcacctttttttgtttgttttttgtttttttggttttttttttttagatggagtcttgctctgtcacccaggctggagtgcagtggcacgatctcggctcactgcaacctccgcctcctgggttcaagtgactctcctgcctcagcctccagagtagctgggattacaggtgcatgccatcatgcccagctaatttgtgtatttttagtagaaatgggtttttaccatgttggccaagctggtcttgaactcctgacctcaggtgatctgcctgcctcggcctctcaaagtactgggattacaggcatgagccaccgtgccagctgacccaagtcttaaagagtaagttcatgtccaccaggtggatgtggaagttgaatgtgtcccaggtaaagagaaccatgcttgaaacagcataatgttgtctgatcctcccaaatagtacagcatggcaagggtttgggatgtaagagacaaaaaataagcctggaaaggaaggtggggataaccaagggcattgcagtggtcaggagtttaggcttgagcctctgggcactaggaagccatccataggattgtaatggcggagccttggctgtccctggtggccctttgcacatgaccaatgcctcgtgcgtggtagacagacccttcctctcgggaaaggccacgttccaaatccaagtttctcttctgctcctgctccttctcttgtctgcacttccactttgagaaaatcctgtttttcagaaacatttcctgagaagatgcgaccccaactctatgcagttctgtaggagcagagctggtgtggagcaatgaaaatgaagattcatttcccctgctcactcccacactggtgaccccaactgtgcaggtgttttgcacattgaccaatgccccaaccccagctgggtgtcccactattcaattccattctgacataatcaacctggagttagtgaagaccccacagggtaagggctcagtcccacaggctgcccctgacttcagatgaaatctcaaatccaagcttccagaacatataagcaactggctgaaagtcagagattccctttagaccccctccgtgggtttgattatttgctagaacccaactcacagaactcaggaaaagttaggttcatcagtttattataaaggacacaactcgggaacagagggatgggagagatgcagagggccaggtatggggatggggtgcagagcttccctgccctctctgggcacgccgcccgccaggtacctcgatgtgttctgtgttcagcactgcacctctctgaaccctgtccttttgggtttttatggggctttcattacattagcatgactgattaaatcactggccattgttacttgaattcaatctttgcagcccctctccacttccaagtggggctgaatggtccaacttcctaatcacgtggttgatttccctgacaatcagcacctcatccttcgatcccacccaaactcaggtatggttggaaggggcttactatgaattttaaaaagatgctccagagctatttcaggagtagggacaaaaagcaaagtttctcacaagagatgctcctgtcactcttatcgcttaagaagttacaagagttctaggagctctggctgggagctggagatgaagaccaaatacttcttattatatctgtatcacagtaacaaatcttaaatccaagtcctgttttcacctcactggctgtgtggccctgaagctagtcgcttagcctctccggccacaatttcctcttttttccccggttctgtgcagaggatgggatctggccttccagacattctggtttgccaagatcccatcttaagccttccaaaaacaaatccagtgactcttcctgaaagctcccagtgaccccttccatgggagcttctacactgctgtgtgcagaaaacagttcaattccgattaatccatgctgtgagtggtttgatggcttcacatacattcaagaggacctggaaaaattaaaggcctggcccctttaagaagtcaagtggtaaaataaggatgtgcagaggcgcctgcgagtcagggacagctgagctcgttgtattactttcatctctttaaaagatattttcagcatccctggccagagggagagagaccagagctgggcccgtgccctggcagggaaaaaatgcttaggcaaggagaaatgaagcccctcttgggaatcctaagaggtcattaacagggccactaatatttgtattctggatatatgctaactgaaggcaggaaccagggccaaagcctgggaagaactgctagttggaagaaaataaacaaggcactgtggagtttatgttcagagttagcagccaggtgagtgtgtgggacttgggaggcgtggctgctgtgacgccttatctagtgggggcatttcacacgtaagttgaggtggccagtttgactgctgcctaatccctgttcttatgtgtgttgcctgctgtgtctccacttctctgcgtacacaggcagccgagcctgcggtgccgcccttccctccccaccagggactggcatccccaattctctggcagacatgcagtggctttgggggtttgccctgcaagaaaactgtcttagtaatacccacatcagacgaaggtgaacacggaatcatctatgaaaaccagtgaaagaaatgacgctgggatctttgatgtgggttttgaacaaagaaaagtttttacgttgagatgtacatgaaaaccaagagtggtttgactgtttatttagaaaacatttcaaacaaacttgggaatcgtccttaatctccgtgaccccgagctcccgttatgctgggagtggatgcagctgtgggctctgcggattgagtccgggaggtccccgggagcctttgatgtcactggatcaactctcactgccactacatgaacttcacagccctaagtaccctctgtcctttgacatggaagccacccttggagggtgtttggggccagctatctagttggacttacttcccctggggctggatttcagcctcttctttttcttttttttttgagaccgagtctcactctgtcgcccagcctggagtgcagtggcacaatctctgctcactgcaacctcctgctcctgggttcaagcgattctcctgcttcagcctcctaagtagctgggattacaggtgcacaccaccacacccagctaatttttgtacttttagtagaggcagggtttcaccatgttggtcaggctggtctcgaactcctgacctcaagatccacccgcctcagcctcccaaagtgtttggattaccggcgtgagccactgcgcccagcctcagcctcttttctttagggagccgtttgttgaattcagatggaagaaagagacagacgaagccatagtaaacctccctgggaggtcttggggccatggtggcaggagggggtatatggctgtctttctcgctgactcagaggtttgaaaagtcacttgtcatggtgcctgggtcccccaccatgatcctcaggggttgtattgagttcaacactattgagaggcaaccaccccggtcactgagctcctgcatgtttcagaataactctggggtatgtcgtcatcccatctaactgaggagggaaccatgctgagagtttacactcctcacccaaggtcctagagttagagaggggtaaacctggttctcaagacagtcctgacctttgaggatttatggtgcagaggtggagaagcatcacggaaaggggactcagacctagaacatagaggaggaggagaactgggataggaactagggcaaggaggggatggcagaaccctcccaggaaggtccactagccctgggcacatgaacctgagccttcaagaagggtgccttacggatgtcagcacctccccacagggtgtacagcaaggagggctgcaggcctgatgaaacaggcacatagcatcactgtcttctcctggctctccagcatttctttctggttttaaatgcttgttgactctgacctctcactgccctctgagaggttcaggagcttaagaaagaacaggattcacttgtccacccaggccacccaggaaattcctacaaatccagctctaagcagagcttctgggccttaacagcatcctcccactgtgatggggtgagctcctggttcaggactgggcaaggaaagcgcttcgtttattatttgatcagacacactttttattgaacaccgggtagccaggaatagcaagatcagagcaaacttccagtttccagagaatatgaagcacggctggggagacaaagaggggaagtcacagtttttaaaagtccagtacgatcctcagggcagtgacaatgcgggagatagttctgttgctccttctacccagcaaagtcccaagtaccccgtctgacccctaagtggagacacagcactttggaaacccaggtgtggtcctggcgtggccgccttatcatgtgacctggagagagtcactcactccccttctctgagtctcagctttctcacctgtaaaatggggctaacaccacctacctcaggggaggacagcaaagaccccatgagaactgctaataaaagtgctttgaagagttgtaaaggaacgtattaagagcagattggcattaggaaatagcattttacaaagcacacccacaggccagacaacattttgaaagcgatgccctccaggacagcctgatcagaaagttcttttgcttttgggatggcccctgtccttcccatatggatcacatttcctgccgagcagtgtcacctcagcctcagcagagcccctgtgcctcaggccggctgggggcacggggagttctttctttacaagagaatgaaagttcaacttccttaatgggcagatggtccgaattatccctagggctctactctgcagctgcagaaaatcagagcctatattcccagccccatgtgtttatttctattctccacaacctcctttctttcctcttgttttgctctttcagggggactggaaggcagggaaaacaaacataaaggagctgcaatcttccaggcttagggtgggctttccctctgcttttctgtagaggcaaagttccctggactttaggtcccttctggtgcacagccaagcaggttttggggtatttagtgaccagctccgttctcagagcccctcaaatgctgtgagtcccattcatccattcattgccccactcattcattccacaccatctgttgagcactggaacgtgcaggctctctgtttgctgcagggatgtgatttggaaccacaaggatgcagaatggtggcccccttcacgcagcttcccatggggagtgcagagagacacggaagagggaatcatggtgcaggatttctcattagtggagagcacatgctggggccacaatcagggaagccttcccagaggaggtgacatctctctgccttactcacaaggccccacaactagggagttgtgtagccggggcttgatcccagatccacattctcccacagagcttctcagccttggctgtgcaccaaaatcacctacgaattgtttaaaactggcccctcacactggtgggtttcagagcttcccaggtgcttcccagatacagtcaagactggagctactgctttcagtctaagactcattcccttaagcctgagaagagtggatccggcagaccccatagggctgttgtgagatggatgaaaagcactttatgtttggagagggctgttattaaatatttgtcttaagcattcagcctgagagtcgcctctgtggattgaaaataacaagcctttgcccttctctctgactcttccatgtggcagctgtgtgaccctgagcaaatttttacttgacttttctgagcctgttttctcttctgttaaatgagctgtaataactaactcatggagctcctctgaagaagaaatgagcaaatgcacgcacaaagcactttgcacagtgcccagcctgtgcacgacgggacctcagtagataatcattctctcctctttttatgcctgacttgagctctgtcctgggtagtacccagaacttggctgtgttgtcgctgggtttggggatggccctgagccaggtgtggccaagccctgctggcagtagatagctctgaggttaccccagccttggaagccagttctgagagatggcagccactggccactacacagtcctcctaaacccgctgggggcggagtaataaaaccacttgctcagttgcgctgaaagaaggaaaaggctgttcctcatctcacaccccagtgatagccatgaatccccaagcacacagtgtaaaataaggtagggaataatcagatgcaaaaccctgggatgtccagagatgccagggcgagtaagtgaaaccagatcctggctttaaaatcctgtaatgcattccccagagatgctgtcgggttcccttccattcccagaggcaggatgagcagctgtctggtgtgctacagagaggagaggatctgtgtgtttgaagtagaggggaggggttcaaggccaatgtccgagaccccttccagctccagggttcaggggcatctggggtaagactcagcctgctttgcctgggaccttgcttgtctgacatatatatttacaaaacaaagagagcaaagaaatgtttgttttgagaggagaatccccacatagtagatttctaaggtctgcactaggagctcaagcgtggtcgcagccctagcattgcattcctgggccattccagagctgccttgcttaacaaataacatccagtttgcatcaatgtacagaaagttgctgacagcaggagccggtcttctgcctcacggatgccctggtcctaatatgctaaggagccaggaaccaagccctggggagaacagaagttaggaggagactcattcaattcaggggatgagcctttttgttcctgcttcctacgagtgcaaaaaggctttcaaggatacatccctgcttggccactggtgtccaagccatcccaagcatggggacccttggagctgacccacacgctgctgggaggactgccacctgaccaggggtgggagctcacaatgatgagacctcacgttaggtgccaagtccttgacatgccctgttgctcccagccgccaccatgatgtccactttaagaagaggtgagaggctgggtgcggtggctcacgcctgtaatcccagcactttgggaggcccaggcaggcggatcacgaggtcaggagatcgagaccatcctgtctaacacggtgaaaccccatctctactaaaaaatacaaaaaattagccggtcgtggtggcgggcgcctgtggtcccagctactcgggaggctgaggcagaatagcgtgaaccccggaggcggggcttgagtgagccaagatcgcaccactgcactccagcctgggcaacagagcttgactccgtctcaaaaaaaaaaaaaaaaaaaaagggtgaggtatggagaggtcacttctggcctatggtggagtcagattccaatcctgctcctgagtccagctgcctccttccaccctcctgagttatctccccacaggaatcaccatgacagtgtgtgatgccttgcaaattcctaatttccccaggacccacagaggcaagtagctgatcagttctcagatgggtgcatgggattcacaggtgccctcttcaggcttttccagtcccaagaaccagagactcatccgggtcatttcaagtaatgaggatatgcaaggagatttgggataaccaggacccatagttcaggtgggccttgtggatcctggcatgagaaggtcactcggaatccaaggccgttctgggggccactgccctttggctcagcttttcactgggaggcctcttctccaacatggcttattgattccaccatccctgcctctcagtctctttgtgtctgctcagctctctccgtattccccagtgtgaactgctgggagaggtggccctgctaatcttcatcagagaggctgggacagaacttctgagtcaggccaatgattcacggtctttcccacgtggaaggcaatgcccatgggctgtgagcatggcacacacccaaccagcctgttgagagccacgctctaaccacatctgacgtctaagacagacaaagctggaccctagttacagtgataagaacagattgtaatcagcgataactattgcagcagggaggagtccagcatgaactgaatgccacctcgatgtgtacagaggtgacgggtattttaagggaaaatgagggattagggagagggaagagtggggactcagtagagtcagggaggtgaaaaattacaaaaagcagaaaggagctagttcatgtaaaacccatctgggtttgataactggtgcttatcacagtgaggcttctgcatcccacgggggacaggggccctgtcttcaggtgttggctggaacatacaggaaattcttttggtagtcttgcattttctcaggcaggcactttaagggggtccagatcatcctaggagcggaatcttgagctattagaaactatattagtaggctgggcgcagtgtctcacgcctgtaatcccagcactttgggaggccgaagcgggcagatcacgaggtcaagagatcgagaccatcctggccaacatggtgagaccctgtctctactaaaaatacaaaaagtagccgggcatggtggtgcacacccatagtcccagctactcaggaggctgaggcaggagaatcacttgaactctggaggtgaaggttgcagtgagccgagattgtgccactgcactccagcctggatgacagagcgagactcctccatttaaaaaaaaaaacaaaaaaaaaacaaacctattgtagttctgttcacatctatacagacatgtcttgtgtctttatagagggaaggttgaggttcaggagagcacctggctacagagtctttgtcactgatcccctcaacaaccctgagaggcccatgggacagtgaagaaatgaggaagtctgaaatgcctctcagacttgcgagagcacttgtagcttgcctggactggccctgcccatccagtctctgccctgggctcccctcacccaccacgctgcttgcttcagacccacacctgccgggacaacctggaactgcctcgcagcattttgcatccaaagaagagacagggtgaaatacctctgtgtccccaaggctagatcgatacatgtttagacatcaattagcaaggcggggatatagaatgaccttcagaagggcagcacaaatcgatgaaatccagggtcaggccccaagtcactgtgtgcacagcgagctgtggcctccgtgctggggcagcacctttcccacccctcccaccctgagcaggtgggatctgtgggtgagaacagcacccattctgaatatgcaggcactggaggttgagactggaaccagggatccggaggcattcagaaggggattccaatcatgcttgctcataaagtcacgcacacatctacccattgccctccacgccatctattcagcatttagggccctcagccagccacgtgtcatgttaagtgttaaggggccatggacaaacaagacatggtctctatttccaagggaaaatagtatatgtgcttgtaaccttcacagatggagagcagtgccacctggttctaggagtgccagcctgccccaccctgggccctgctggtttaacctcaaactgtcttctctctgtattatggtttgttactgaaagtagccagcatcagaaagagaagtggtctcaaaagagaaggatctggcatcccagtaatggctggtgacttctctgtcaacttcagtttcctcatttctaactgagggttttggagcccctgagttctctgccagctttgacattctgtggtctttcttatctattttaaactcttagttcatttgagtgagtccagggcaaagacaatacttatttatccttgcatccttagtgcctagcacaatcctggaatgtggtagtaattccatacctgcaaattgatggataaataaatatgcaattgaaaaaataaacacagacattgataaaatatacataaagaattaatacagataatgcatttttagtgctgcatatctgtgcacgggaagtagaatcaccccggacttcaacaaatattatcactttcctcaaaagccaaggctggtttatccttcccctgcgtgcaatcgttgacatgttcattttcaaatgcaaactcagcaatggctgtgcttcacaaaggcaaccctgtcttcttggttctcccataagactcaggagaaaccaagctgtttctatgaattttagttagaagcattgcagttccagggttaaagtaattgtttttcatgtaactgctccatcaaaaggcatcttgcatcaaagtcgtgatgcaaattggtggaccatgctcagggatcttctgaagaaaggattctgggaaagaaaggagggtgtagatggagaactggcccgagggctaagtctcaagttcaggccccagctcttctgctagctacgggatgacttgggtaaggcacgtcacctctctgggcctctgctcccacacgtgtcatgcaaagagtgtggactgtgtcatcttcaagtctctaccagctggcaaatgctatgcttcaccatcatttgtgattattggaaaagcccaaagatgatgtcataattaccgaaaaatcactccaagcactaagtaatgggacatctgttgccgacaactaagctaatggaagttgttcctagtgatatcctgagaaaatgctaagattccttgtccagacccatgccttgatcttctccatgacctggcctcatctgtgcctcagctgtaccctctttactggggaacaagctcaagctttgagagatttggggcctgtagaaggagggtggctgaggaccatggggttggtcccggtggggcctgggtgaagggcaggctcagtacaacaggttgaggaatggggaggcaggtgctgtggtctggggctgcagtgaggcagagagctccaagccgaggctggaattgacactccagaaaagttgtggggtgaaacaatgagccccttgatctgggagacagcaaggaggctacccagccaggagccagtctcctgccctgtgttccctcaaaccactttcctctcctagggttacacagtgaaaccaggcagggatgctctggtctgggctttgaggtgacagcacttttctctttctgcttctctgtatcaaagggaagaaccttggtcacagggtgttgatggggcttgtaaccaaaccgaagtgggatcttcttgcctggcatggtaaagccaaacatccatactgaagttgtgcagtgggaggaagcatggtgtttatttgcaaggcaccaagcaaagaaaatctggtagctcacacttaagactcaacctcctggatggcttacaagcaaggctgtttaaaggcaatggtaaatttcaggagagcagaagttacaggcaaatttctaaatcaagacatggatgttatacattggtttggcctaaaaaggtgggaaatctggaagcaagggcttacaggtcatacatggcttcaaagactttctgatttgcaattggttaaggaagggaaactttgtctaaaaacttgggttcagcagaaaggaatattaaggtctggcctgtggatgtgacttcttccaggtcctcagagctagctaggtgcctggaattttcctttattctgtggcactggagaataaagaataaacacaatcattagctgggcatggcagcatgcaccctgtagtcccagctacttgggaggctgaggcgggagagaatggcttgagcctgggggacagaggttgtagtgagccgagatcatgccactgcactccagcctgggtgacagagccagaccttgtctcaaaaaaaaaagtccgtcaatcagagttcaggcctcagtttcccctcatttgaggtctatatgccagcaaatccatttggttctgggtttctgaaaaacatccagctgggtttctgaaaaacacctcagggacatatgttaagatgttctctttagtttctatagagagtcatcagaggttgactctaacttctttgactattgctttaagctactatttctttctttcttaccaagttgctcatttacttcttggggctagcctagaatttcccttgaagatactcaagattttcttttatttccatgtttgggggcctagcagcccctaagtccctgctccatctcgggcttgtggtccccagttctggggaagcagggaaaagatgaacagagatgagccctgtggatatctgggtgtctctgctatggggggcaggggtgggcattacaagaaaaagctctgccaaagccttgtgggatggggattggaataagctgtcaagaacagcctctccttgtttttagtaaggaatagctcttggtgtttcccttcagcttgggttttccagccaagtgatgctatgtgccggtgccattcctgcacagagctggtagggaccagccttgtagccagtaccatcctcttaacttgcaaaccatgaaggcatggacaggtagaccccagtctgcaggttagggatccagaacaagaggaaaagtgtgatagtctctgcacctaacgccctcacctgaggggtgcaaatcagatacccacacgggagtggtatggggcagggttttcttccgggttgctgatcctcatttgctcaggaagggttttccagggctcaatgtggtatgatgccaaggaggaggtgaaggtgcctcgcagtcattgaagggcagttactaggggacgtggctgcaacctcgaaagcctggggtcccattgctcatcaccagctctcttgccctttgccctctacctggagcatctgctcttgctttggagcctaggagtctctgaatttcacacaatcaagaatccctgtctcccattttcctccactgccacgtgcagagagaggcatctccctgactccagtagccccgttccccctgcagggaccctcctggggggcatctgaggaaaaaactccctggactgacaggaagagtcttggggaagtcacggaccaggctgaggctgcctctcagtcaccacttctgattaagtcggggctgacacattgtggggcaagagcatttcccagtggtggttggtggcttggtgggaaagctttgacctggggcagaaactgccgggaaaaagcagcatttaaaccctctgcccacagaaacccaaacctcttaaatgatgacgtccttctcaggctagagggtagtcactgttggagggcgttggtgattccccaagtgtgttgctggaggtggcctcattgctcagctctgggaaaggctcctgcctgcctgcctcccctatacctcttcaggggtaaaggaggccagagacacaagtttctgaatttagactctgagttcctgaatcagggcagcctacatcataagcaagtcagacctcagcctgtggtttcccagagaggtggtaacagagctgagattttgttgggtggggagaaaaggatgcaaaatccacagcttagggccatgctctgtgaagtggagctacaacaaaatgtggcctctgatttgggtgagtccaggggagaaggtgtggctttcagatttgtgttgaccctgctggggcaggcagcatctgttgaccctgtgggcaggcggccctccaccatggggggaagccctgagtctaggggatctggggacaggtggtgaggaacaggcctccatgcttaatgaaccgacactggggtctgggtggagtggtgccttgtgcagcctcgcccaggtgctctctagttctttttctcccttgagggcacttttcagttcctgagatcaatgtggtccctactggggagaccataggagccctgcaggccatgactttgctcaatgcatggtaagcatgggccatgggccagagacatccttgaaattgatgctttgcatcccgtgattatggttatcatatgttttcaattttttgaaggtgtcttgtttccaaatattcttctatcacttctatatacattgaaacctcttgggaatttcagtatttcagcatccaaatgacattttccagacttcccattgcacccaccatgatcatctgacagccatgtccccattctctcacttgagatgtacggtcattgtaacagcctgagctctgggtccagaatccagagtcatctcaagtagagaaggcagcaagtatgtgattagaagtgttgtgatgtaataaagaggatgctggagatttggggccctgatgttggattctccattcaggttgccaccaaagccctggactctggggagccatgccctccagccagcacctgcccatctgggtccatattaatgagtccctccattcatgcatgccttccctttgcacaggctgggtatctcagtgcaccgggccctgtaccaggtcacgtgatcctcagaaggctcacagtgtcctaagagagtaaatagcaatagcaattatgacacaaagctataagcatgtacctagaaggggccctgttgggtgtggggaccagggaaggagaagaggcatctaagctgagatctaaaagacaaggaaagcttaggccagagtacagaaaggagttttctgaggtgggggagtccacgtccttcctcagctcattcaggtctccactcaaggccttccttctctactcgtccaaaatggcacctgctctcactccccaccctcttccttgttcacttgtccaagacagtacctgccctctcattccctcccttgtccacctgtccaagatggtgcctgccctctctctcatttccttccttgtccactcggccaagatggtgtctgccctctctctcatttccttccttgtccacccggccaagatggtgcctgccctgtctctcatttcctccctcctccacttgtccaagatggcgcctgccctcactctccactcctttgttcacttgcccacaatagtgcctgcctcactctgtactccctgtgcttctgttcccatctatgctcttatcaccgcttggctataattatggttttgtttttgttgactagctgtattgctagactctccctagaatgtcagctccatgagggcagggactctgtttgtgggtgtatccacagctgtctgatagactctcagtcacttacttggctaaacgagtaggtgcacaaagtgagttcaggctggccagaacagagaggctaagtcagggagtctccgaccgtctaccttggctgcctagtcacacccagtcacactcttcctgttgttttgaccccacacctgacttctgcctggcctgctctgtgactcacagcaccctcctgccacttcttgccctacttgctgaccccacactgtggcttctgttgcaggcctcctggtgcagccagaggtgaggcaggtctgtgagaaaccagggctgacagcctggcctcagccaacccagggccaaggccccgcgcagcggccgggtccctcttggtgctgctggctgcaggttagcctgtccttactgctcccggggagtttcttggtgtcagacccagcctctgaattccagctcttctccatgtttttcttctccaggatctctctgttgtcttgcatagcctcagcctgtttggggacagcctgaatgagtttgtatttgcagtctgtgtggggagaacggtcacctggccagggatgaaggatccgcagcaaatacatccaatatcgagaggaggcatccctggtgctctcgctgtagtctttagcatcattcctggggttggggtcgcttcctggtggcttcctcggttcctctgcagaattttctggggttttcttggcccaggcatgtggccagttctgagttctctcctttctcatggggcacagatgtcaattctgccatctccttcgggacctatgaaagtctttgccaagtcacagtcattaaaaggaggctccttccagcccacttggccaaatacaagataaaggaaaaacaaaagtccaggagtgccgcgcttattagtagcagggcttgagtaggtttgttattttctctggcagttcacatgggcattttcctgcattgtgtcacccacttgtcactgggttccagtacaatgtccacccctaccccacatgacaccagtggattctggctttaaaaagagatgaccctgatttcttctctggccttggattactgagggttggagctagaaggaaccttgctgattgaccctctaatctaaatgccagtccacagcccacaaaccaattgttctgaattatttgggacacttggaaaaatagagatccctcactcttgccaccaagattctctttcagtaggtctggattggccgtggaatctggtgttcctaatgattttgataagacccactgaccactccagtatcttatcaagtgaggatgctcaggtcccagcaggggaaatagcccccaagagtagtggggcgggcaggatggtgaaaaggatgtgggaagacacataaggaaacgcaagctgtgatcccagctctggcactgaccatgtgtttcaccctgagactatgacttcccagccaaaccctggctttgtgatgatccaaaggcttctttcagttgctctggtgttctttgggtccccaacatttccccttggagaaccaatgcattgtaatgctcaggaatggctctctactacattctgcaaacattgatttttcatttcctccagccaggctgtgtgccaagcactgagtttagagatcaatgtgacaggggctcagccctcagagaagggggaacagacccacattgctgatgtttccatgggccaggattgtgccccagagcccttttagctttgttgcattttgtttgcatgacagtcctgcagtgtagatgttgttcccatgtcgcagttggggaaatgcctttagagaggttgtgaggctaccttaaggtcattcaggtcgaaagggcctattatgtgccaggtgctattctgagttcttcacatctattaccatgtttcattgattctgtgacacacatttatatgtctgtgaaatcaggaagcacctggcacttgatataatttgccacctacccagcagagatttttccttcttagtggcatataaaacaggcgcccattacaacaggtggcatctcagatttgatgaaccaatgtgtctcacagttgcagatagtaagtggcagaaccagaattcccaactggctctctctggcttaaagcactttcacactcacagcctagtgggaaagtgaacatgaatgaccaaatcagggctgagacacttcccgggacacagccatgctacctgcccacaaagtcttaaccatccttggcttcctatttctcctacaccctcctccctagcaggcaaggctgctggtcaccgggtctcaaacagtggagagaaatctggtaatcacactccttgatatttacccaaatgagctgaaactgacatccacatgaaaacctgcacatggatatttatagcagctttattcatccaggcaaaaactttgaagcaaccaagatgtttttcagtaggtgaatggatgaataaactatggtgcacatagaaaatggaataccattcagtcctaaaaagaaaggagctatgaagccatgaaaagacatgaagcaaccttacatgaaggttcacttacttattactaagtgaaagatgccaatctgaaaaggctgcatactgtatgattccaactatgacatcctggaaaaggcaaaactacggagaaagtgaaaagatcagtggttgccaggggtagggaggagggagagatgaatagtctcactgaataagtggagcacagaagatttttagggcagtgaaaagattctgtatgatatcgtaatggcgaatacacattattatacatttgtccaaacccatcgcatgtgcagcaccaaaagtgaacccaaatgtaaattgtggactctgggtgatgacgaggcatcagtgtaggttcattgagtgtaacaaatgcaccactctcaggggatgttgataatgggggaggctgtgtgtagagggaggggtgttgtatatgggaattttctgtacctttcaatcaatttttctgcgaacctaaaactgctctttaaaaaaggctattttattttattgtttattatttcaacttttattttagattcagggggtacatgtgcaggtttattacctgggtatattgcgtgatgctgaagcttggagtatagatgatcctgtcatccaggtagtaagcgtagtgcccagtagttaggttttcaacccttacccctcttctcccctcccccatcttgtattcccacccccacccctgtgtttagctcccacttaaaagtgagaatatgaggtattggtgttctgttcctgcattaattcacttaggataatggcctccagctgcatccatgttgctgcataggacatgactttgttcttttttatggctgcatagtattccatggtgtatatgtatatgtaccacattttctttattcaatccgctgctgataggcacgtaggttgatttccatgtctttgctattgtgaatagttctgcaatgaacatatgagtgtatgtgtctttttggtagaatgatttattttccttcagatgtacacccagcaatgggattgctgtgtcaaatgatagttctgttttaagttctttgagaaatctccaaactgctttccacagtggctgaactaatttacattcccaccaacagtataagcattcccttttctccacgggcttatcagcatctgttgttttttgactttttaataatagccattctgactggcgtgagatagtatctcatcgtggttttgatttgcatttctctgatgattagtaacgatgagcattttttcatgtttgctggctgtttgtatatcttcttttgagaaatatctgttcatgtctcctgcccactttttttttttttttttttccttagacagggtcttgctttgtcatgcatgctggagtgcagtggcacaaacgtggctcactgcagccttaacctcccaggcttaagtgatcctcccacctcagcctcccgagtagctagcaccacaggcatgggctactatgcctggctcatttattattattattttgtagagacagggtttccccatgctgcccaggctgaggctggtcttgaagccctagcctcaagtgatcttcctgccttggtctcccaaagtgctgggattataagcataagccaccaagcccagccgctcttttgcccactttctgatggggttatttgttttttgtttgttgaattatgttccttatagattccagatattagacctttggtgaatgcatagtttgcaaatattagtattttctcccattctgtaggttgtctgttcactttgttgataggtttttttttttttttcctgtacagaagctctttagtttaattagttcccactcgtccacttgtcaattttggtttttgttgcaattgcttttgagcacttagtcataaattctttttcaaggccaatgtccagaataatgtttcccaggttttcttccaggattcttacagtttgaggtcttaaatttaaatctttaatccatcttgagttctataattttgtataaggtgaaaggtaggggtcctccagtttcattcttctgcatacggctagccaactatcccagcgccatttattgaatagggagtcctttccccactgcttattcttttgacttggtcgaagatcagatggctgtaggtgtgtagctttgtttctgggctctctattttgttccattggtctctgtgtctgtttttgtaccagcaccgcgctgtgaaaaaggctatttttttaaggtggggagaaggctggcaaagggcagaagaggcacagggtgatttgggggctgaagtcttgatacagctgggccccagccctctcttcctcctacccaggggtaggcggagtcaaagaaggcccctgggggcgggtcctggtgtatctagagctgggtagtgacagttggctgctccggcaggtggcgtggaggccccgatgatgatccgcctggtgaatggctcaggtccgcacgagggccgcgtggaagtgtaccacgaccggcgttggggcaccgtgtgtgacgacggctgggacaagaaggacggagacgtggtgtgccgcatgctcggcttccgcggtgtggaggaggtgtaccgcacagctcgattcgggcaaggtaaggcgctctgagggcaaaaaacatgaggagagggcctgcacatcctaggactgggctcacctccaaagcccgagtcccttccactgcaattccgcgaggtccccagcctctccccaaatgcttgctgcaataagaactcactgccccgccccaggcaaccatctccggtggtcatcagacagttctgatgattagaacattcttcctttcgtggatctaagtcctgtcctggtggtgtcccataccagcccttcccagtcctgtgtcccaggcacagctgctgtggtctctctctccctggctagctctttagacctttataacgtgctctcatgtctctattatgtttttattgttaacacttatatgatactcagtgtgccagcctatgttctcaacatgtaacaaatatttacccatttcatctttacagcactatgaagtatacaggtatcatcgctgtttttcttttttcaaggagggaaacaggatcttgttctgtcatctagtttggagggcaatggtgcaatcatggctcactgcagccttgatcactcgggctcaagcgatcctcccacttcagcctcctgactagctgggcctactagcaatctccagctaacttttcttcttatttttaatagagatgaggtctcactatgttgcccagactggtctcgaactcctgggctcaagtactccacccaccttggcctcccaaagtgctgggattacaggcgtgagccaccatgcccagccatccctgtttttcaaatgaggaaataaaagtgcagagaggttgagtaacttgcccaaggtcacacagctagcaaatgtcagacccgatgtttaggcccaagcaggtgtcttaggagtctgtatttgaaccactctgctgggctgtctctgcctctctgagtcttttcttctccagattaatccccagatattcatcttgccctcatatgacaagatttggagagtcttcatcattttggttgctttccttttgacacactgaagcacactgacctcctacagatagcacaagagactctgaggaaggggcacagacccttcttaggtagatggctgattcaaaccctgcatttgtttcctgatggaaagaatcagactcttgtgttgactcacaactaaaacaatggtcccacatgcacaaacctggtactccccacacccattcagtagtgagctttcccttgatggcatgtcctggccctgttgcttctgcattctgggtcttggtgtcctgtctgtaactaaagggcctgcaggctgcataatgggtctcccagcctgggccccctgggatttaagatgccactgctcacctgtggagaagaccaggtgggtgtggggagggattggggctgatcctctcacacccagttaccaggccccctggtgacctgtggatggcagcccactgacggcagggttccccacatcatggagtggagccgggcgtacctgctgtcttgcctgaggtcattgctgtccaacccactgtgctaaatggctacagggtgaggggagaaagtggcatgtcccttccagatggggactcggagccaggtcacatccagactggaggtggaagcctccactcctcccagccgccttcctcttcatccccataaggggctgctgcagttcttggtctgaatctcatcccatagatctcattggtaattgactgaaagtgacccttggtgaaatctgtcgagccagctggcagggagtgccgtcttaagggccagagtttgaggggcgagttcgaagggatccggcaccatgaagggcagcctaccaggaaagaatactgttctcccacctaaggcttggggctggattccagctggttttgactaaggaaaaccaccgttgttgttgattagaataggaacagtcctcaaattcccatttctagctccgaagaaggcttcttcctaataagtggcagtaaaaccttttgagaaaaaaaattataaattattttcaagaagccagaataggtagtttgaagatcacaggtcatgttagcctgactctgccagttggtgaaaaggcagtgggtgggcttcgagtgccaggccagcgatcctgtagactgtggcttctttcactcccctgatctgttcctcttgacacagggaagctctaagcttgtcacttgattctttaaactggtcgataggaagctggacttgctttcacgaatgccctatttttttgccccattatttccctatcatggtgccctaacaggtctcaggtgctattcaagaccttggctggttgcaggccaggtgtcactagcagtatacagagggctgtaggggcctgggcagggaagggctggcataactgaggctttctgccagcccaggctgcacccatgttctcctcctctctacaagcagtttccaggcacctagcatgggccaggctagctgcagggctggggggcagagctgaccaagcccagccctggccacagcatgggcaatgtagaggaggattctaaaccatgtgccaagggttttaatgctgttgtagtcatggggccgagaggagggaaagctgtcattcctggcggcaggcagagccaccctgccagcatcctacccactggtgccccaaccccactcccagctcgtctgctgttgagcctgaaggagcctcccaggtccctctcgctctgcctcctagccttcttctcaccctcttccttcctgacagtttcctctccctagcacccccaacaccccgcctctgctgtccttgtgttctgcacactctctctggaggctgcctccacacctggggcttcagtcacccccagctcttccctctgtcacagtgctcagtggagctccagacccaagtgtccggtgaccttcctgacaggtgcactcggatgccccatgggcttctccaatggcagctgtcacaattgcacacatatccttcccaccagatcctgtgcctctctcattgccatcaccagaaccgtcctaccagtcagaccccatcccagccagaaccctgggccacctcttccctgtcaccactccccctccccacatcaggttggtccccgagtcctgcagatcccaccagtgttcactcctctggcattccttgaacctgtccccacctcgtcgttcttgctgtcctccccttaggagattagcaggtagagcagtggttagtgccccagccctggagtcaaaccacccatgtcagaatcccggatctgccacttgcagctggagaccttgactagattccctaccctctctaagcttcagttcttccgctattgaagaattactataaatgctaaaggagatcttgggtgtcaagcagttagcatgcacaggctctgttgtgcacgcttatctacaagtgtggggtggaggtggggacagtagaggctctaatcctccaggagtcactcctcacggccaccacacctgcaggctagctcctgtggccttccttctcatggctgctggggatctttctttttttctctttttaagagatgaggtctccctctgtcacccatggagtgcagtggtgcaatcatagcttgctgcagcctcgacctcccaggctcaagcaatcctcctgcctcagcctcctgagtagctgggaccacaggcacatgctactatgccaagctaattatttcattttattattttggagaaatagggtcttgctatgttgcccaggctggtctcaaactgttagggatctttctaaaacgagtgcctggtcacctcactccctgcctgggtcctcagaggatttttatcgctctcagaatcaagctggatttccttagctcagcacccaaggatcttcttagttggcctcctgcccaccccacacctctccacactgcacctgctggtggttctcggggcacagatggtgtgtttcatgtcccacctcttctcctgtgctgctcctcctgctggaaggcttttccctccctcttcagctagggaattcctactcagcttttaaaggcagctcaatgatctttcctgagggaagcttttctggctccttccatgctccctcacccctaagatggaaataaccctcctctatgatcccgtcacattcttctctatcacagcacttcttatactctcctgatccctgcgatacatggaaacatcttgagggcttcacctttgtagttccaaaacccaaaactacctggggcataataggagctggataaatgtagaagggaagaaaggaaggagggagggaaagtaggaagaaaaggagggaggagtgaagagagggagggagggaggagtgaagggagggagggagggagggaggaacagagggagagaggaaggaagaaagaagggagcgaggaaggaagaatagaaggaaggaaggaattccagtgcctgccaaacctgagtcctccctgtctccaagccctgacagctctcccaggggtctggcaccataacatttctcctggacagggcatagtaatcagattttctgtttgcatgggggaagccaagaaagacccaaatgggagggccttgaagatgttctaaattttaaattggtccaggaggtgctggagtgatgcaaatggcgaggtggaagggtgatgactggagggaggcttggtaggccacggaagggagtgtgacctagcgcagctgggagcatctcccagggagacagacagatggaaaaggaggtaaggattgctgcacatcagacagatttgtaggtgggaacaggcagacaaaattaggagcgttcacgtctaattattgcattattacctcctcttgtccttttatctaagataagattcaaatattgggagacagctttagtgcaagggtcagccaacattttccataaagtgctggatagcaaatactttaagctttgtgggccaggtggtctctgtcacagctactcagttctgcagttggagtaggaaaacaactgaagccaatatgcaatcaaatgggtggggctgtgttccaatacaactttatttataaaagcaggcattggccagacctggctcacggtttgccgtcctctggctgagtgttacatgctgtggactgtggctgtgtgaggagaaaagactgtactggccgaacatgagaggccagggcagggcctcttcacctcaataattactttcctagagatgtcactcaatctttctggggcctcagtttccctctcttaaatacctgttaaatagtcgtcctgctttctatgtgtgaggcacagatggaagcctgtaggattcagtgtaactttttcctactatgaatgttactctaaataaacacatagaagctcaaacgttagctctataaggcagaaatcttttgcatctgttgttttgtctttctgttcatcagaatggtactgagcacacagaggcctcaataatttggttttttgctgttttgttttgtttttgagactgagtcttgctctgtcacccaagctggcatgatctcggctcgctgtaacctccgcctcacgggttcaagcgattctcctgcctcagcctcctgcgtagctgagattacaggcgtgcaccaccacgcccagccaatttttgtgtttttggtagagacggggtagagacggggtttttagtagagacggggttttgccatgttgaccaggctggtcttgaactcctgatctcaacgatctgccctcctcagcctcccaaagtgctgagattacaggcgtgagccatggcacctggccaagagtctgcctttctttcttttttttctttttttgggtgagcaacaaggctatttatttcacctgggtgcaggcgggttgagtcagaaaagagagtcagcgcagggatttaggggtggggccgttttataggatttgggtaggtagtggaaaattacagttaaagggggttgttctctggtggggaggggtggggacataaggtgctcagtgggggagcttttgagccaggagaaggaatttcacaaggtaatgtcatcagttaaggcaggaaccggccatttttacttcttttgtgattcttcagttacttcaggccagctggacatacatgtttgcaggtcacaggggatatgatggcttagcttggggtcagagacctgacattcctgtcttcttatattagtaagaaaaataacataaaatagtgttgaagtgttggggcagcaaaagttttggcgggatggtatggagagataatgggtgatgtttctcagggctgcttcgagcgggattaggggcggcgtgggaacctagagtgggagagattaagctgaaggaagattttgtgtgtctgcttttctaacaagctctctggtgatgctgacagccctggtcttcaaactgcacaccttgagtaatcagctatcagttctaaagctaaaacaatgattggtacctagagctgacagggttctagcctctgcctggtggtgcaaggagcagagagagtttgctggcaaattcctccgggaatgatcccccgccaccgcagtgttgacgtcactgcagatatgcactgctcctcccttgatgaccgtgttcccattgtattggtcctcccgtgactggatgtgaacaagaaccccctggtgaaacaccagctagagtttcaagatcctatatacgtatttgggctgggtcaccttggaactgttctttatttgttagtcttctttatttgctttgggtgtgactaatcccacagagccctggggcttgcagccttttcctgggtaatttgtaaaccgatgtgtcttccaggagacgtttaatctgcaaatcattctctgcctcaaagggcttattgtgtaagagctacagctatccaggccaggaagaggctctggagaagaaacaacatccaaggaggtggcggaaggggcctctcctccctcctccatccccggattcactgcatggcaatcccgtgacaacaggggctgaaaatgtctacgtaacaaaaatatgttcaagccacttagttcatctgttagagccaaacagcagggaagtggtttaaatgttcccttgacattctttgtaaagggattttacccacgtacttcaagagtgaatgacagagtttaagactttaatagccagtcctgacgctgccactaaaaaggagaggttgtccggcttctgacacatagctgatatttgtagctactaccatcatcaccaacaattattgtgattctgccctcaagaaactaatcccagaaaataagtatgaggtcttcggggggcgtggagagggcagctggaagcccctaggtttgagtgtacagcagagccaagtcaagggcaggcacagttatgctctctcttctccttctcgccctcctgtgtatccgcttatagctgtgtttccctgtctccacaggcactgggaggatctggatggatgacgttgcctgcaagggcacagaggaaaccatcttccgctgcagcttctccaaatggggggtgacaaactgtggacatgccgaagatgccagcgtgacatgcaacagacactgaaagtgggcagagcccaagttcggggtcctgcacagagcacccttcctgcatccctggggtggggcacagctcggggccaccctgaccatgcctcgaccacaccccgtccagcattctcagtcctcacacctgcatcccaggaccgtgggggccggtcgtcatttccctcttgaacatgtgctccgaagtataactctgggacctactgcccgtctctctcttccaccaggttcctgcatgaggagccctgatcaactggatcaccactttgcccagcctctgaacaccatgcaccaggcctcaatatcccagttccctttggccttttagttacaggtgaatgctgagaatgtgtcagagacaagtgcagcagcagcgatggttggtagtatagatcatttactcttcagacaattcccaaacctccattagtccaagagtttctacatcttcctccccagcaagaggcaacgtcaagtgatgaatttcccccctttactctgcctctgctccccatttgctagtttgaggaagtgacatagaggagaagccagctgtaggggcaagagggaaatgcaagtcacctgcaggaatccagctagatttggagaagggaatgaaactaacattgaatgactaccatggcacgctaaatagtatcttgggtgccaaattcatgtatccacttagctgcattggtccagggcatgtcagtctggatacagccttacctccaggtagcacttaactggtccattcacctagactgcaagtaagaagacaaaatgactgagaccgtgtgcccacctgaacttattgtctttacttggcctgagctaaaagcttgggtgcaggacctgtgtaactagaaagttgcctacttcagaacctccagggcgtgagtgcaaggtcaaacatgactggcttccaggccgaccatcaatgtaggaggagagctgatgtggagggtgacatgggggctgcccatgttaaacctgagtccagtgctctggcattgggcagtcacggttaaagccaagtcatgtgtgtctcagctgtttggaggtgatgattttgcatcttccaagcctcttcaggtgtgaatctgtggtcaggaaaacacaagtcctaatggaacccttaggggggaaggaaatgaagattccctataacctctgggggtggggagtaggaataaggggccttgggcctccataaatctgcaatctgcaccctcctcctagagacagggagatcgtgttctgctttttacatgaggagcagaactgggccatacacatgttcaagaactaggggagctacctggtagcaagtgagtgcagacccacctcaccttgggggaatctcaaactcataggcctcagatacacgatcacctgtcatatcaggtgagcactggcctgcttggggagagacctgggcccctccaggtgtaggaacagcaacactcctggctgacaactaagccaatatggccctaggtcattcttgcttccaatatgcttgccactccttaaatgtcctaatgatgagaaactctctttctgaccaattgctatgtttacataacacgcatgtactcatgcatcccttgccagagcccatatatgtatgcatatataaacatagcactttttactacatagctcagcacattgcaaggtttgcatttaagttaaaaaaaaaaaaaaaaaaaaactaaaggtgaaagatgccacattgaacaaactaaattcccaacccggttctggcaaagaatccagttatcccttccatgaagacgcacataactctcttacttggtctttccattagggacaacataagtcttgttttacatcaaataaaaacaatgttaaaaagtgtgtgaaccttaaaaatggaagtctactagtttacatacctacttcagaggacatggaaatgaccatgggcctgcatttcagggaccaaagcaaattaggcctggcctaaaatacatcagaccttttgtaagaaagaatttcaataaagcaaaaaacatgtcacaag

SEQ ID NO: 402 - DNA, 9046 bp, Homo sapiens
taaagagatagagtctcactatgttgcccagacaggatttgaattcctgggctcaaggtatgcttctgtcttagctcctcagtagctgagaccatgggcacccaccactgtgcccagattcgggctttcttgtaaaaagcggatggatgcttgaaactattttctgaatccctttggctcccaaatgtgaatattctgggaaatatttttatccaaattagctgagtaatcgagtagttaggcacattttgaagactgaggcttgtcctttaaaagaagggcagcccacaaactgacttccttgagccaaaaattgttttaaaaggggaagtacagcccaaaacagtgattttaaaatatcaacaaaaagagtcaaattctgtaaaatatttaaagagatttattctgagccaaatatgagtgaccatgtcctgtgacacagccctcgggaaatcctgagaacatgtgcccaaggtggtcagggtacagcttggttttctacattttagggagacatgaggcttcaatcaaatacatttaagaaatacattggttcagtccagaaaggcaggacaacccgacgcgaggcagggagcttccaggttataggtacgttttaaatttttctggttgacaattggttgagtttatctaaagacctgggatcaatagaaaggaaatgtctgggttgcaataagagttgtggagactgaagttttattatgcagatgaagcctccaagtagcaggcttcagagagaatagattgtaaatgtacttaaggtctgcgttgatgtgaatgccggcttgaggtataatgaggcatatctgacccccacttcccctcatggcctgaaacaatctctcaagttaaattttaaaagcgccctggccaaggagaaagtccattcagatggttagaggccttagaacattatttttggtttacaaaaacgttgagttgtgaacactgagagcctctgcccagaatgtaaaagagagaattcttgctgactgtggccgggcatgcatgtcctttcacttcctttttttttttttaaaaaaaaaaaaaaaaaaaaaaaaaacagggtttgggcgggggaagtaagggggatgtgttatgataaaggggccttggcagcactcttctggtgtggtttgaccaggctccacccacgaattctgttttcttttagaggtcactggagagcccggtggggtgtaagtacactgcgcttataaaactctagcaggaagctagcagctgtctccaaacccagagaaggggaaacaggaatcgattaggaataaaggattataatccactttccttctgaggaaaagctgggaaccttctcattttgccttatgaaaactaagctgaatcgactgctgccaaacatctattaggcaaaattggcctcttgcccatgatttgactttccagcacagccagttctttttctcctctgcagctgattggctctggagtgtggccagaagcctctctcctgcaattaaaggagtcgggtctctaactgttgatctgtttttttcccttctgagcaatggagcttaccatctttatcctgagactggccatttacatcctgacatttcccttgtacctgctgaactttctgggcttgtggagctggatatgcaaaaaatggttcccctacttcttggtgaggttcactgtgatatacaacgaacagatggcaagcaagaagcgggagctcttcagtaacctgcaggagtttgcgggcccctccgggaaactctccctgctggaagtgggctgtggcacgggggccaacttcaagttctacccacctgggtgcagggtgacctgtattgaccccaaccccaactttgagaagtttttgatcaagagcattgcagagaaccgacacctgcagtttgagcgctttgtggtagctgccggggagaacatgcaccaggtggctgatggctctgtggatgtggtggtctgcaccctggtgctgtgctctgtgaagaaccaggagcggattctccgcgaggtgtgcagagtgctgagaccggtgagtgaaagggtgtgaggaggactagttagtagcagctattatcatagagggcaggcctgtcaatttcaggtggctgaaacattttaacataaaaagtaaactactagaaaatactgtagaattttttaaaattttagcgtgggagagaagctataaagagaaagattgataaatctgaatataaaaacttaaaactgctataaagaaaaaacctcctggccgggcacagtggttcacgtctgtaatcccagcattttgggaggccaaggcaggcagatcgcttgaggtcaggagttcgagaccagactgaccaatatggtgaaaccccatctctattaaaaatacaaaaattagccaggcatggtggcaggtgcctgtaggcaggagaatcgcttgaacctggtggggcagaggttaaagtgagccaagattgcaccacagcactccagcctaggcaacagagtgaaactccatctcaaaaaaaaaaaaaaaaaaaaaaagaaagaaagaaaaaaaagaataagaaaaaaaaactccccaaaacaaagttaaactacaaaacaagcttggaaaaaatatttgccagggatgatagacaaagggttaacttccctcatgttaaaagacattacatgtcaataagatcaatatttttcaataagaaaaacaaaagggaaaatgggcaaataacaggaacagaaatgtaaaccaattataggacaaaagtgctcaaacttaaagagttaattaaaggagatactaattttacctattatactgttagggacttcttttaaggtcagtatagggttggggtgggtttaggggactggacaccaccatacacattagaagaggtaccctctttgggtggtatctgataatatcaaaatttaaaccacacatactcttttatccacatgcaaaaacttgtccatacacaagaatattaagtagaatttgtaattgcacaaactggaaataactgaaatgtctatcaataggatgctatgtaagtgagttgtcatattgtataaaggaacactgtgcagctgtcagaaagaacaagaagagttatctgtgctgatacttaaaaatccccaagggataatgtttaatgaaaacaaaaagcaatcaagccacagaatgttaggtagagcgtaggcccaccacatgcccattgtgtgaggcagggagaggagatacatatatgtgtataagttaatgggaatgacagacaagtaactattaacagtggttgcctttggggaatgggattggattcagggaaagaattacttttcattttaaacctttccgtaaagtctgtaattctttatacctgtatgtagttttcacatattacccttattatttttagctagtttaaaatcgttttatattctgaacaaagttgaagatatggatatcttaacatttgaatttactcttctgggggaaaggcatgttttgtaatccccagttttcattttttgttgagacagggtttccctctgtcacccaggctggagtgcagtggcatgatcacagctcactgcagccttgacctgctggactcaagcaatctttccgtctcagcctccccaccctcccagcagctgggactacaggcatgcaccaccacacccagctagtttttgtatttttgtagagatgaggtttcgccatgttgcccaggctggtctcaaactcctgggctcaagtggtctgcccactttggcctctcaaagtgttgggattacaggtgtgagccaccatgcccaaccatcagttttattttctaatagaggaagttcctcaggaagaaaagaacttggagatagggtttagggaaaatcatacaatcctgtcttggctcaatatcagagtagtaaataaaaaaggactgattcttatacccaaatgctgggttcttatatgctaagactgggcaccaactggcacattagtagatgttttgcttacagtgttactaatctcccaacaccgctgcaaggcaggtaattattatctcagttttccagtgccaaaaatcaattgaactcttaaagttatcacattcgtgatagtcttccttagctcctgccaagcacccactctctgctggatataacaagggaactttattacattttcatttaaccctgtcaacagtcctctaaagtacatatcttcatgttaggacaaagaaacagactcagagagattaaggaatttgcccaaagttacacagctagtagacatggctctctttaatgcaaatgcaaatattccttttttttgaaacagagtcttgctctgtcgcccaggctggtgtacagtggcatgatcttggctaactgcagcctccacctcccaggttcagtgactctccttgcctcagcctcccgagtagctgggtttacaggcacatgctaccacgcctggctaacttttatatttttagtagggatggggtttcaccatgttggccgggctggtgtccaacttctggcctcaagtgatccacccaccttggcctcccaaagtggtgggattacaggtgtgagccaccgcgcccagccaaatgcaaatgcaaatattcttaccactgtaccacagtgcttgttattggggttttcatctttctgatttcaacattgctatcactcttgctggctcttcttcctctacccatctcctaccactggggttcctttcttggtgacacaggatttttgctccttagctcagctaggtccaggttcttgtctcacattcaggaagaaataggcacgtgaacatggaagagtgagtggagtagaatttatcaagcgaaacagaaagctctcagcaaaaagaggggtcctgaaaacaggttgctggttgcccccttcgcaactgaaaagctgatggagctggattccctgtttgtaaaggcatgaattcctggtggctccaccccattcccccagcgtgcatgtggggccttagtgggctgcaggcatgtttaggcaagcccctgtgcaagttcccttatctgcacaaaacatctcatgtaaccatttgtgggactggtcagaagttcttccgggacccttccctactgtctgcctaaagcaagctggctaactcctttcattggttcatttcacttatatacactccccagcaatctcatatacctccacagttctcaaataccacatatatacagatgtttccaaatctaaacatctatcccaggtctctcttctgaccccaaaccttcatatccagccgtctactcaacagtctcctggattgctcagaggcacctcttaacatatgtaaaccagagggcaacactgacctccccaaacctgcctctcctcctttatgctgccctatcctatgaagattttttttaaaatcagggccgggcacggtagctcacgcctgtaatcccagcactttgggaggcctagacaggaggatcacttgagctcaggagttcgagaccagcctgggcaatgcggcgaaactctgtctctataaaaaaaaaaattagctgggtgtagtggtgtgcacctgttgtcccagctacttggggggctgaggcagtaggattgcttgagcccaggaggcagaggttgcagtgagctgagactgtgccactgcattccatcctgggtgacagagccaggccctgtctcaagaaataataaatgaataaataaatcaggaaattccaatttttctattcgtaacataggtcttacactgacccatataatttggggaaactccatcactaaactgaattctctctctaaactctgcctgaggagccaagactaggataactagaggaggccaagaagagtggtgcagttaccacaattttgtgaggtgactgtctggtcccttgctccttactcccctcagaggtagatatgtagaaaacttctgaagatgtccccacacataacatgtaataacatctattgtgcctgtacttgatcaacatttataaaactcctcaatgaaagcagcagttgctaattcctacaaagagtaatttacatttagcatccactgactgaataaaatacctaatgacaaaatgttaccttgaattcagtaatgattttagatgaatcagaattttcattaatcatatcacgtacatatttgtgaaaatggcacaaaaatttaaaacatggttattcagtctcaagggtgtgcttagtgtggagtgaccctcctgctcagaactctacggttctctcacaggtttgcaaggcagtgccagagaacaattttcaaaaaataaattaaaaaagcagaaatgaaaaaatccttgaaatgtttttttttttctttctttctcagggaggggctttctatttcatggagcatgtggcagctgagtgttcgacttggaattacttctggcaacaagtcctggatcctgcctggcaccttctgtttgatgggtgcaacctgaccagagagagctggaaggccctggagcgggccagcttctctaagctgaagctgcagcacatccaggccccactgtcctgggagttggtgcgccctcatatctatggatatgctgtgaaatagtgtgagctggcagttaagagctgaatggctcaaagaatttaaagcttcagttttacatttaaaatgctaagtgggagaagagaaaccttttttttggggggcggtttttttggtttgttgttggttttttttttttttttggcgggaagaaagagttttgctcttgttgcccaggctggagtgcaatgacgtgatctccgctcactgcaacctccacctcgcgggtttaagcgattcttctgcctcagcctccctagtagctgggattacaggtgcccaccaccatgcccagctaatttgtatttttagttgagacagggtttcactacgttggccaggctggtcttgaactcctgatctcaggcaatccacccacctcagcctcccaaagtgctgggatgacaggcgtgagcaaccgcacccagcttaaggtttttttgttttgttttgagacggagttttcgctcttgttgcccaggctggagtgcaatgctgtgatctcagcttaccacaacctccacctcccgggttcaagtgattcacctgcctcagcctcctgagtagctggtattacaggcatgcgtcaccacgccggctaattttgtacttttagtagagatggtgtttccccacgttggtcagtctggtctcaaattcctgacctcaggtgatctgcctgcctcggcctcccaaagtgctgtgattacagacgtcagccaccatgcctggcctgaaaccttttttaggtaaagttgaattccatccttaaaagtttctgttatatcctatttagccattttctattgtctcccaaagaattcacatcaaaaaaacagctttgaactcccccttcaaaggaaacagtcgactttcataattagcatctaccattatccccaaatcttattttattcattgacttgaaattttttccaattgcttttttttttttttttttaaggttaagagcagaggtttactaggccaaagaaagagaatagctctctgttgcagagaggggtcctggagaaatgggttaccccagttgtcttatttaaatggttacccatcagattttaattttatcttctctttgagagcttggtaataagaagcacttaaatcactccaaagaagactttaaaaagggagcagtgaaaaggtcttaataatttattgattgaattaagaaatactagctaattaagaatctgagtctaaacagcacagattttttctttctgcttttaaattgtgttttaaaaaaagagacagggggctgggcgtggtggctcacgcctgtaatcctagcactttgggaggccgaggcgggtggatcacgaggtaggagttaaagaccagcctggccaacatggcaaaaccctactaaagatacaaaaaaaaaaaaaaattagccaggcgtggtggtgggtgcctgtaatcccaggtacttggaaggctgaggcaggagaatctcttgaacccagaaggcgaaggttgcagtgaaccgagatcatgccattgtactctagcctgggtgacaagagcaagactccgtctcaaaaaaaaaaaaaaaaaaaaaaagaagtagagacagggagacagggtctcactgtgttgcctaggccggtcttgaactcctgggctcaagtgattctcccaccttgacctcctaaattgttgggattacaggtgtgagacagtgcacctggccgaaatagctcaagtttctgaaaaacaaatctgaatctatttgttattcttagcgtcactggtctggctttcagaattaacatacaaggttgccacacctagttctgcccagctttatgtcttttattccagtattccaccaaagtttgttttcctgcattccagttctcaagtcttaagataaagattgtacttgacagtttagtatatccataaaactatttgaggtggttaaggttcttgggttcattttccttaatactttgctgaatattgtagattgtaggcaatgaaaaagtctactaaattaggaaaaccttgaataattaggtatcctaggtaagagcccctaaacatcaagcaatctgtgagtctgtaaagaaataaatattttttggattattcttatctaattccacccctgttggaagatgatttctttgttctttgcaactatggaagctgtgaaaatcatcacaagtgcctctgaaagcgagtgttaggttggttagagggtttaatattttctgcaatggtttgtaggaattttaataaatgtagtatattttctgagatgattttgtaaaagtactattttaaatatcaaatcaaccaataaattcacatttgtgttaggaacagaaatatggttta

SEQ ID NO: 403 - DNA, 32978 bp, Homo sapiens
aatatgacacacaattgacactgaccagaaacacagcgccaaggacactctagtcctagccatgaaatgttatgattccaggttttcaggacagagcagagtccacttctcatctccagtatccgtaaaaatttgtccaaaatgtaactaagaaaacacaatgatattagttacttctgctccccgtcaccctcaaccccactgattacgagatgggaactcacacaaaactttgagacaaaagagcaacaagtttgctttattgtttgcttgttttgttccggagtcggggccgggagggagtgcaggaggagggatccaagcttccaagcctctgctccgctctccttctatccagttggtctttagggcactgaaggaaactcttcttcagaaataaccttttaacttttcttctgtcagctgcctgccaatcacggagccagaggctgaggggaggctttgagccggtctgcgagtccggaaggcaaagatcgcgaagcttggcgctccagaacgctcagggggcaggtgacacagtcgtgggttccccggcgggcgctggcttgacagtttcctccccgcccactggcaggggagcgccccgccgggctgcacgcgcgcgcgcgcaggggggcataaaagccgcggccgcgcggagacgcggagctcgcccaccgcccgccccagcagtggctgcaccatgcacgtgaacggcaaagtggcgctggtgaccggcgcggctcagggcataggcagagcctttgcagaggcgctgctgcttaagggcgccaaggtaagcccggcgcccagccgcggaaatttctctgcccacacactccgagactcgccccgccgcccgaggtgcactggcggagacagggaggccgcgcccggcgtgcccactttgccacttccaaaatttgctgaagctgaggctgtgagcacacctcagaagtggctgggagggaacccaaacctaattgccaaatttcaggtccaggaggggagcctcttgtgtgtttattgtttgtccgtctatttcgtgagctgcgcaggcccgcgattcctctcctcttgtctataggtagcgctggtggattggaatcttgaagcaggtgtacagtgtaaagctgccctggatgagcagtttgaacctcagaagactctgttcatccagtgcgatgtggctgaccagcaacaactgagaggtaagacaggggaatcaatctgtcaactgggaacgtgctctcaacaagcaacaacctgaaggcagcccggccagggggccctgggtgccgcctccgctgcctcctcgagagcagctaccttgaagctccaaaagacagtttggactgatacgtttccttctgacagcccaatagctgtaaaaccgaaagaaaggcaagactgctggagaaatccttttattgtagtcatttggcagcattaatgtaatcaaaattcctttatgtattcaaagacagtgctgctgcagtaattattaaatgattgaaattgcagacaaaacttggaaaattaaagtaggttaagtaaggtactgttgacaaacaacttctcccagaaagctggagtccaatgacaatcaaatgtggcagtgtttttcgtttaaacatatcagaatacaagttcaaggagcatcatcacagaagtgctagatgcttttgaccatatgttttctccggctttttccccaatgagacagtactttaaaataataataatagtaatcataataaagtatacaatgttagaattgtagtagaaacatctctatcagcctttcctcaatgctttcctgtttccggctactcacttaaaatagaccaatctacttgtgaagtatcagggacaatattggcatacacaataaacagctttgattataaagctgttttttttttttttgtacatctattggagaacttgagagtgccccaataaacttacaggaaacaaaaattctggagaaaaactagaaaagtaaaatatttgtatttcacaaagttttattcaaagagactgagtaaattgtaaggcactttttaatcaaggggtctgaaaacttttgcaaatcttattccagtgctcctgttcttaaagggacatcaaatgtacatttattttaaaattttaaaatattctgtaagagaatgaaaatgaactgacgtgttagaaggaagtggtgtaccaacagttaagagaaattgtaaaggaaattacataactgaaatctgaaaatgctaataaagacctataacacagatgacaagcatgagcagaacagatttgtaaacacaatgcaagaggaacatattgtaccagaggacaattatgttgattgcacatgatattttggatcaaggatagagccaggtcagatctcaacattcatgctgatggcataaggaacagtataaacaatctgaaagccatttctgtctcaatttatatagtttcataaatgacatttaactacaattgtttttttcccagtatttaaaattaataccttggctataaactcattccttaaggataaatgattgtggaggaggaaaaatactcagacacataagtgacccgggaaggcatgttggtcatgagaaatccacatgttgtctggacatgagcatttgcttgcatctaaaggaaacatgacattgattcttccagtttcaggatttaatgttgcctataacttttaaaattgtttagacagtgtggaaattataaaaatatgagatgaaaagtttcttggagataatctaaacataacttattttccaaatgaacaaatcacagccaagagagtttaggtaagttacaaagagtaccatagcatataaatgtcagcaagaggtagactgtctgttgcttgagcctggaattcaatgggatgtcagaaaacaagatggtatactatacattggtaagggcagagtataaggaatacggtggagaacagaatgaggaaagaaaattaaagcggcaattagacatacatatttaacaccctcattttccaaaaggtgaaggttgtttctgtggagttatgaagagttagaacatactcagaatggaaggagaaaaaaaaaatactgggggacattttctggacccaatttgagattttaagaaacatttttaagattccatgaaaaaaggccgggtgcagtggcttcacgcttgtaatcccagcagtttgggaggccgaggcgggcggatcacgaggtcaggagatcgagactttcactcgcgtctgtgtgaagagaccaccaaacaggctttgtgtgagcaacaaggctgtttatttcacctgggtgcaggctggctgagtcggaaaagagagtcagcaaagggaaataggggtggggctattttataagatttgggtaggtaaaggaaaaaggggggttgcccgctggtgggcagcagtgggggtcacaaggtgctcagtggtggagctttttgagccaggatgagccaggagatggaatttcacaaggtaatgtcatcagttaaggcaaggaccggccattttcacttcttttgtggtggaatgtcatcagttaaggcaggaacaggccatttaagtatcactacttttgtgattcttcagttacttcaggccatgtggatgtatatgtgcaggtcacaggggatataatggcttagcttgggctcagaggcctgacagagatcatcctggctaacacggtgaaaccccgtctctactaaaaatacaaaaaattagccgggcgtggtggtgggcgcctgtagtcccagctactctggaggctgaggcaggagaatggcgtgaacccgggaggtggagcttgcagtgagctgagatcaggccactgcactccagcctgggggacagaacgaggctccgactcaaaaaaaaaaaaatccatgaaaaataaacagtttgtgtttgttgttcttccattcccgtacagtgagtgtaaaaggtacatattaggaaatcttgaaaatgtttttagtaaacaactagcatagtaatttatctatatggcaactgattaatccatgtcttccccaatatgtctggtggttgttaatgattatatgaatttatttcaatcaaaataaagcttatgctgacctactttttttaaggacttgatatgttggtctggacacctgagaatatatttccgtcatgtagaaaaacaaccacaatttttatccatagtgtaaaataatagaagtagaatgaatgatcaaaggcccggggaaacagtttaaatcaattagaactctgtcaaaggctgctttgagaaacaatagacatgtgattggacagtgtaatgaaagacattcaggcctcagaatccatgccaactttatcctgtttgaacatagttttatacaaactagtaatcctagtaatctgaagtagtaataatagtgagaaagaagaaggaaatagtaaacatcgaagtttcagtaatcaaataaaatcaactgaatgaaaagtagacttttactaagatataaaaactcccccaaacatgcataatagatctgaatacacaagaatatttgtattaacataacactttatgaatttaatatggcttatggaaaaggatgtttaccaatagtctaagctacagagcttcagtagcttctcagggactaagagacattgcttgctctaactgacttcaacgagctcttagcttaggatcttagctcagttctctaaaatgtaccccattaagttactgcttatagaacttcaatgtgcatacaaatcatgtaagaatatgttaaagttaagattcttattcagttagtctgtggtgtctgcaaaattctgcattcttaccaagctgccagattgatgcttctagtccacaaaccacacattgagaaacaaggaattaattacactcagcccatgagtttagtaactttcactatgagggtaaataaactgaaattcctctcatggcataggacatgatttaaatgtatacatggaaaataagaatgtatcactaatatcttgttttataattagacacttttagaaaagttgtagaccactttggaagactggacattttggtcaataatgctggagtgaataatgagaaaaactgggaaaaaactctgcaaattaatttggtgagttatcttagctatatttcttgtctataattatttaataacatgatgtttgtaaagaaaaaaaggttcttggagtcatggaaacaaaacaatgacctacaatattgaaaaagggaagttacagaaagctggataaaagcattttcttttataaaaaggaagacatttaattatgaaagtaagtctatcttaaaatattagaaagaagcatgaataaaatataaatgattgcttaactcagggattggcagactatgacccacaggccaaaatagcctgccaactcttttggtatgacctgcaagctaaaaataccattttacatttctaaatggtggataaattcaaaagaagaataatatgattatatgaaattcaactttcagtgtccataaagttttattggaacacagccacagtcattcatttaagaattgtcattggctattttcatgctacaggggcaaagtttaatatttgtaaaagatcctgtggcattcaatgactaaaatatttacaatctggccctttacagaaaaagctcgtcaaccgctgacttatttatttaaaagtaaatcttaattaaatgctagaatgtaacagaaaacaaaattaaagtgacaatcgaactttgtaattagtaggactttttatcctgaaagttcgtggttcgtgtgtgtgtgtgatttccataatgtttgataatgacttagctcttaaaaatggtagaattaagaaataaaattttctcttttatccattaagtcatgagtttatgggttacctcattctataaatacccttgacataagatattggagtttagtaaaaatcaaacgttaactaaaactaaatgtcaaataggctgtgcctggggtctccctgaccttgctaaggtcattctcaccaatcttacaaggcaggtaattgtagagtacaatttggccactgtgtatgtataaaggtacagggagtgacctcctacttcatgatatcctcctagtagattataaactccataaaaacaagaactgggttgtgtttttctttgtctctctctcagtaatcaacataatatcttgaagatagtgcttagtcaatacattttttacttaaattgaaatgcccatgagtaattacctaactgctataataacttgatagaggcaatgaggatgacacttcttcacaaaagagccaaatctgtaagtcctaccttgagaagagtacaaaattgctccctaaacttgacagataactaaaatacagttttcttttagttttttaaatttttcaattatttttgttggcttttcttttccaacttttattttaggttcagggtgtacatgtgcagatttgttacctgagtaaatcgtgtgtcactggggtttggtgtacagatgatttcatcacccagatagtggtcatagcaacccatagatagttttcccactctcacccttctcccacccttcatcctcaagtagaccttggggactattgttcccctttgtatccatatgtgcttaatgttttgttcctgtttgtaagtgagaacatgaggtatttgattttctgttcctgcattaatttgcttaggataatgctctccagctgcatccatgttgctgcaaccaacatgatttccttttttatgggtgtgtggtgtttcatgctgtatacctacccgtattctttatccagtcccccgttgatgggcatctaggttgattccgtctttgctattgtgaatagtgttgcgatgaccctattagtgctgtgtctttcttggtagaatgatttatgttcctttgggtatatacccagtaatggggttgctgggttgaatggtagttctgttttaagttcttcgagaaaagctccaaaatgctttccatggtgtctgactagtttactttcttaccagcagcatataagtgttcccttttctctacagcctcgccaagccaacatccattatttatttattttttacttcttaatgatagccattctgatcgctgtgaaattgtatttcattgtggttctgatttgcatttctctgatgattagtgatattgagcattttttatgtttgttggccatgtgtctgtcctcttctgagaagtattcacagaagtctctttatgtcctttgccctttttttaatggggttgtttggtttttgcttgttgatttgctcaagttccttatataatctgtatattagacctttgtcagatccatagtttgcaaatattttctccagttctgtaggttatctgcttactgctttgatagtttcttttgctgtgcagaagctctttagtttaattaggtcccatctatttttggttttgttgcaattgcttttggagacttcatcatgagatctttgccatggcatgtcttcagaatggggtgctttgtgttttcttctagaatttgtatagttttaggttttacatatggtgtaaggaaggggtccagtttcaatcttctgcatatggctacctggttatcccagcacaatttattgaatagtgcatcctttccccatgctcgtttttgtcaattttgtcaaagatcagatgattgtaggtgtacagccttatttctggcttctccatgctgttccattggtctatatatctgtttttgtaccagtaccgtgctgtttgggttactgtagccttgtatagtttgaagtcgaatagtgtgatgcctccagctttgttcattttacttagaattgctttgactattctgactctttttggattccatatgaatttgaaaattgttttttttaattctgtggaaatgatgatggtagtttgataggaatagcattgaatctgtaaattgctttgagcagtatggccattttaacaatattgattcttcctatccatgaacatggaatgtgttttcatttaataatgacatctctgattcctttcagtagtgttttacaattctcattgtagagatctttcaccttgctggtgagctgtattcataggtattttattctttttgtggttgttgtaaatgggattgcattcttgatttgcctcttagcttggacattattggtgtttggaaacattactgatttttgtacattggttatgtatcctgaaacgtaacttaaattgtttatcagttctaggaaactttgggcagagactatggtgttttctatgtatagaatcataccgtttgcaaaaaaagatagtttgacttcctctcttcttatttagatgccctttattcctttctcttgccagattgctctggcttggatttccagtactatgttgaatatgagtggtgagagtgggtatccttgtcttgtttcagctctcaaggcgaatgcttccagctttttcccactcagtaagatgtttgctttatgttacttcgatgcctatgttgttgaggattttttaacatgaaaagatgttgaattttacctaaaatcttttaattaagaaggaaggttctattttacagtatggataccctccttgcagttcttttaaaactttttctccagtgtacctctttcattatatttgaaaataacttgaaactgtcaagcttccctcaaaatctttttgggattctaattgcaaatatacatacatgtgtttggagagacctgatagctgattttcctgagttgagacagttctgtgatcttcttctactttagggtagaaatgtattgaaatgagatattctgtctgtgaatcatacttacatctcttggctaaatcttccattattatgatatatgaatgtttaatataccattgaatttttttaattcctaatttagtatttgtgcttctgtacttataaattgtactatccttaattttcttttcttataatgttcttatttggtttgggtgtcatctatatcctggcttccttttatgtccttgatctgttcatttctcaacagaggcattcttatctcaaatggcaaatggcagtctgcctacctcttttagtaattctgtaagtttagactctatatattataaatctataatattcagagcataagttgctaatgattgcaatttattgatttttaaattttttttaaagttaaacttctgatttgctgtctgatgattttttaatctattctatattttcagatataaaattagtaccctatcattttctttggattcacattcacctacctttttccattactttattttaaaaatataagcaaccttttatgttaaatttgttgttgctgatggtttattgtgagatcttagaatcctctaatctgtagttagacacaactgggaacatctgcctttttaatatttgtgagtttaagccatttatttttactcttccgttttatactttaatatttactgttttctttttgtttttattctttttctattccttccctaaatgcattatatagctttaattttcttatgctggtaaaaaaaaaaaatatgcattttatatttactctttggaggatacccctgacttattaagagttgtatttcattacatcttttggtagcctgataaaacaaaaattttgaaaatatggctaattgggaactgcaaggatttttaagaatatagactcatgccactttccaaaaccacattaaatgacgagattttctttgaaccaggctatcccagtgaaaaagcacaaattgcacaacagctttctctctttaacattactactgatatttgtaatagcttcatcggtaatatctacagatatttttacagataaaattaatagagtatatagttcctgtatttggtgacttcctaatggacacttgctgtgtcttttctctgaaaaatcagctgtcagaaacagtgtgcaatgattacagctaacgtaaagaaacatggaaatattgaggcaaatattacgaagttacagaattcgactgatgtcttcatccagctgagagggcatgtttgctttaatgtagcctgtgtgaatacctgctctgagctggaaagtgccaatatcatgggcaaataggaaattctggaagaccaggggaattttattgtgatcctttagttataactaacaggcctagttccttctccattgaaatttatccagcctttatttttcttgggactctgctgacataggccacttttcagcttcacatcaggaactgatgatatatgtttacataaagaaaacaccatggaacctttgttaccaatgtattacttaaaaatatgttacttcccctcctacctaaacccgttgcaagagtagaatctgaccaataatttaacttccaacttgattatctctgttactgtaatgcaaatatttgtgtgtagtttatataactcttttttgaaactctgctctggatttaatttgcctccttgggtcttatacaattccatgtttgttcttttgcatgtttttctgtattactgctcatgtcagagagtaacctcttaaaagactttaccatatatctctccttcttctaaaatattatacaacatatttataccattttcatagggcttaccagttttttaattttattagaattatttaaatatatacataattcatgctattcatgctagtaaaccacaagttctttcaaggcagaaaactattgtcttgtgtccttacagatgttagttaatagttactgggtcacctgccattacctgtatatgatattttgcatacatgagagtattcacttctatgtctcagtacattgctttccaaatacattagttcttccaaacggtatcatctgtccttctacttttactccttatcaaatttactccttacttttcactttgctgatctcatccttcttcccactaaaccttttcccagtctttggtttccattaggctattttatacttcctccttagtctgaagccaacaacagcagcattatgtattgctgttcagaacacagaagaaatgttcagcaggccgggagcggtgactcacgcctgtaatcccagcactttgggagaccgaggcgggcggatcacaaggtcaggagattgagaccatcctggctaacacgatgaaaccccgtctctactaaaaatacaaaaatttagccgggcgtggtggcggacgcctgtagtcccagttattcaggaggctgaggcaggcgaatggcgtgaacccgggaggcggagcttgcagtgagccgagattgcgccactgcactccagcctgggcgacagagcgagactctgtctcaaaaacaaaataaaattaaaaaaaagaaatgttcaggaaagaatgagtctttgcaaaactatcaacactcatgctggcaattgggcagaggtaaacttaactttgaatattgattggaatggtaattctgtcatgtagttttgtaactttctgaagtttctgtaaacctaaatatgttcatccccactgatgtggaacttacagtctaattttgacatttaactaatatatgttgaattccttaacccatttatgccagaggttgcaatattttgaatttttgcatgagttaaaaattagaccttggcaatgaccttgaacagtaggatataaataactctcacgtgcttagtattccaataatggaacactaggcataagtgggtcaatatattcaaataagatttaaacaaaataaatgaatgttgctagtcattttttttttttttctgaaatgcacttattgactaaagatttgccctgggaaatacatttctttgggattagtcaaaattagaatccagtcttgactctataatttataaactgttattttatttctctcatattgagcttcccagggaggaaggtaaactccctatctctaaggactgttacgcttaaataaaccatagtttatgtgaatatccagcacagtgccactgcatagaatttattcaataaattacacttcccttccagagcatcaaaatctacattttctggccaggcacggtggctcaggcctgtaatcccagcactttgggaggctgaggtgggcggattagttgaggtcaggagttcgagaccagcctggccaacatggtgaaatatataatatatagacacacgtgcacatgcgtatataatctagaataaggactacgttgttatagtaaaggaggaaaagtgaaaaatgtcatttctacacagccaaagcattagaccctgtcttgtagattcatcctttgaactctttcatttgaaaaattacccagttcttaacctgataatggatgagaaaaataatcccttgcctttctccaccaaagacctaaagataaatattgcttttctaaaaaattaaaaataaatcttaaaaaatctcaaattttctatctggcttcatcttgttcatgtcgaaaacacaacagtggggtgtcagcaaagctgtaatacctgagaataaaagcgtagtgccaatacgcatgaacagaaattctgttcagacatgctgaagccttctgcagaaactaacagaatccaactggcttcattaatttcagccatctacatctttttcttcttatataaacaattaatgttttggttttcctttctaaagaaaatcatgtggagattttattcattctccctaagcctacttactgtcaaattgacacatggcttaagtgaatagaacctccaatttccttttttgttcaagagctactgttaggtaggagaagtatatctgaatccttgcaaaaaaaagaaaacttcaaaaggaaatttttaagagaaaaagaaggtaagtacatgtgtaacctccgtttcagacgcattacctattgtatcgttttctttgcagtattgtaaagcatgaaaaaaataggaattaagatgtcaaaaaagaattttccttttttaaaagtctgagctggaagggataggaattcttaaatccaaaaggaaaagtaaggtttgaaatatcaatttgatcacacaggtttttttttttcttttttttttttggtagtgatttgaacaaaaacaggaaaagtgcctacacatggatataagtggcaaaacagtcaactatcaaaaggatagctgtaagcagtgattaataaaatttagttatagacattactaaagaccagatgtccagctaactgacaatcaccacttaaactggataaaacatttatgtgatttcacacaacacggagttgaggattgcttgatcttacaggtcaatgatatcatcgggcccagggttgtgtcatccctcccaccgaccattctttatgttggtttcatcttcaggatactaggaaataggggttgtccatttaagttacgacattcatataaagcaggcaatgtaaccatttcttcaggttttcttaagagcaacaaaaaatttctcagcagcatccatcctgttcccatctctagctgattgcctcccaggtctcactgaccaaaactgggtcacctgctggctctgaaaccagccactgtcaaggagaatgggatttccatgactgaattaaattaattaatcagtgtctacattaaatttggggagatcaccttcctcgtattatatggagaggaggtagatacaggagcaaaatagaacttttattagaaagaaaaaaggagaaaataaaacctctaggaaatcaagagtaagcattattctatattccaagatccaagagaattaaacagagtagttaagtgtggaatactgagacatgagaaccatatgcagagaagaagggtaaataaattttgcatccaacatttagaaaacaaaaagaatatatggaattattgaagatgttgagaattgagtgaaagtaatagacatttttggaatacaacctgtagcataaaatctcatattgggcaactaagtgaagttttgcagatatatgacaagctccacaatgattaggcaaacccaaagaatccaggtttaatgactaactttaaaaacaaagctcttttaaaacctttcattgataatatttgcagaaatctccctaggtatctggaatagctataaaaactttggtgtgtgaaaatatgggaaaggataatgactgtattccttttctcacttatgcctctggattaggtttctgttatcagtggaacctatcttggtttggattacatgagtaagcaaaatggaggtgaaggcggcatcattatcaatatgtcatctttagcaggtaagggcaattattacattaaatgtaacattttcttactggtaatttggaccacaaaaacaaatcttcaaagcatatttattatcagctcaagttggaaattaaaaatctgatcgttttatagttccatggaattttctattgcaaaatatcaaaagtttgaaaaatatgtttatttctcttaatttaacttgtggcttttaaagttatcttactgcagtaatatttgaaaaaatatatataatttttttttagagccaatatttttcaaaggttgtggtgagactcctaagcaataatgcatgtgaaagcacctttggcaaagtaaaaagcactaaagtgaagttaagatgtctctgctcccatgtgattttagtaacagtgtgtaattttaaaatatggcatatatcatagttaagatatgttaaactaataaataaagccaaacttacatgtagtataagcacattccttaactcgtacatcagtctgaggcaagatccttgttgcaggtatctcttctgtatgcagacatttgaaaacctggctggcagaagttctgccgtcttcagcagggagctcccagggttactttagaactgctggattcctttttctctagcagaaagagaagaagaacatggaggaggcatggctactcttttaagaaccccagcccagtaatggcagaccttctgctcacatttcagtatagaacttgagctcatgtttcacctaactgtaagcgagtctgtctgggaaatgcagtctagctgtgtgcctaagagaagaatggatttcagagggcagctaatcatcttttccacagcatgcaatcctaaactatagtattttcagagtagtatgatttagtatcagctgatatcttatccttcaatactagccttaaacctctgactggactttttggagcaactgagtcaagtgactttactttttaaaactctaggaaaaaatcatcaatgattcttgaatagttcaagtgaaattgtgaagtttaagaagtctgatcaacatggacagcaaatctaagctatcttgtccaaaaaagtgagactttaaaaaattatctgtttggttttagttaatgtggtgatttcagaatagaaatttcagccccacaccccaccccaaccttggcatctcagctccagtgatttgggaagttgggtttggaggtacctgtgattgaacctctgtctgattctcagcatttgtctcatccctctaggaatgattatcaaatggttcttttatatcactgtaaagctgccaccagaggagatttagaaatctcctttagaagttctcaaaaatagactagcatctcattttctgggtcgcttaaagtcaaaatcatgtccctaaagctattacaaacctatttctataaatttttcagggtaatcagattctttttcctagtggtacaactacttataaattataacattttaatcctaatgatactttaaaaggtgagcgcacgggcaatatttgaaaggggtatgtgttccagagagggccaaatgttaagctgtgggagactgaaaccctaaaagcaaattggcaaagctaaatctatactattttgaaataaaatcataagaaaaaaacaagtgactggagaattaaaaagagatatttagtattttcttaaaagtttaaatatttaaaaacctggggctgtgatcaagattgataattctctgtattctttcataaagctaagagggtcagcaaagcttggagtaccatgaatattctacaaggagcccctggcctttatgtcactggaggcactgatttcattctttggaaggctgaaagcctcagagttggatcaatttaggacgatctgggagaaattctttaccataagagggtgcttccttgccccaaagagcatgaataaagaaatgcaatgtagaattactgccttttatctgtttaaaatattcaaatatataatatcatttattgagcactgtttacctgatatcattttaaacactgtacattaactcatttaatcctcacaacaaccctgtgaggtaaactctatataatttccattttgaaaatgaggaaactaaggcaggagaagtgtgaaatatcttgcctaagcttatacatcaagtaagcctcagagctggaattcacatgcaaatagcctggtacaagtcttcttagaattttaaccactagattatttatctatctctaatatctatgcatttatttgttaatctacctgtatttatcccagcctaacagaaaagtaaaagcaactgaaatcgtttcaattgaataaacccttgcaatttgctagtctcttcaggcttcatgggcacagctctaatctcatggctgcattactaaaccttcagtgaaatcttaagcttttgccccatttgatacttccagtaaagtcctaaaaatatctggggagcttaccagtgtcacaagtcaaaacatgccattgagcagagcagtttaaggcttgcaatttgatgtccactttgctttgttggctaggagcttgctttgtcatcccgctcaccgccacctcccgccaaccccaggtgttaatcctctttttacctatgtcagatacaacatttgcaatcatgtgtgggcatttctctattcatgcagataaaacgatgacttgatataaattcagtgataagattgctttggttttaaattactttcctggcactggtacaatttaatgaataatattgcattacaaactgcttctccctctgattttcctccacatgtacaaggcaacactatgtaaaatggttaaatagcttaagtttgtcattgttccctctgcttggcttactactctctccattttcagaagttgtccttggcaccctctcttcgtaattccagcctccgcacctcttgtgtttatactgtttcctcgttgccactggccaatgtggacagtctacttcctttcccatccagggctcccactaacatgccttcaactcacaaagtcttaaaatgaattgccttgtattttatccaccaacggagagcctccaattcttcccataatgaaattagtttgataaaaattcaggatattgtaataatgggagaaggcaaaagaggacccctccgtcttcatcattccctcagaaatggtatcaacaattttatgcccttgagtcatagcatgtaggaagaggtgagagcacaaaaataatctttaaggagttaacagagtacttctaatatttgcctactctgtgttttccaaaccttgcttcctcacagatttttttttcctgtttttctctgtactgcttactctattgaaggaatggctgtgggtaatattcagtattcaactcaacagggcctatcctcatgatctctagcgtggatacagtggagtccttcactgtcacagtaaaaccttaagttggcacactggtttgagtagagaagttaatgagtaatgaccactgacgcagacagagtatcaaatgcaattaataggtttaataaacaggagtagttaagtagacaatgattcctcagcagattatgggatgggtatgctctagtctggagttccacaagttgttctgagtgtggttaacccacatggacttttctacacgagtttttatttataaacataatatacaaacagacactaattttgccacatccatcctgaactattaaaacaaagttggaaggaacaatagaagaacgaagtctggtttaatgcagataatcaaacagctatgctccattaaaacatctcatgagtcaaatgcactccgtttgtttgtttgtttgtttgtttgtttgtttgtttgttttgagacagagtttcactcgtgtcacccaggctggagtgcaatggcgcgatctcggctcactacaaccaacacctctcaggttaaagcaattctcctgcctcagcctccccagtagctgggattacaggtgcacaccaccacgtctggctttttttttttttgtatttttagtagaaacgggatttcatcatgctagccaggctggtatcgaactcctgacctcaggtgatctgcctgcctcagcctcccgaagtgctgggattacaggcgcagttcttaagtatttaattgcttcagattgtgggaaaggaaaagttattgtcacaggaaaaggagcctacctaccaaccctgctacatattcagttagtgaggctgtggtgttcactagggacatgctctgtcactcagtagcattttgtgagagataccatgagggtcttatttactcagaagtcaaaacattggagtctccagaaaatatttaaaaatcatacaaaattttcagcatgtcttaagtaacaacccagtggcatatctgcttgtgctataagttttatctataataatataattagctcataatttgtgttaaggtagaagtgctaaaattactaccttaaataaaaatttcaacttaatcaaacatatgttgagcatttgcagaagggaaatggagatattaaagtaactaggcaaagtttctaccccaagagctgtatatcagtgtctcttatcaagatgacagaaccaaataatttccatgacataaactgtttaaacagaagcattggccaggtgtcatggctcacacctataatcacaatgctttgggaggccaaggcaggaggatcacttgaggccaggagttagagaccagcatgggcaacagaatgagacctcatctgtataaaaatttttaaaaattagctgggtgtgatggtgcacacctgtgttcctagctactcaggaggctgaggtgggaggatttcttcagcctaggagttcaaagctgcagtgagctatgattgcactactgcactccagcctgggcaatatagtgagaccttgtctctcaaaagaaaaaaaaaaaaaatcaaaaaacccagaagcatgatatttaagttgcaaggccttgggactccaatagccgaagaatggactagaatatccagaaattccaggtgaaataaaacattgatcatcttcttctatctctgggccaaaggtaagaaaatcgcatggcaccaccctctactactgctctcgtgataaggaagcaggcctaacacatattgagcaattgccaagctccaggcattgtggtaaactattggctttatgacatccacatctaacttttacaagtctctacaatagaggtcaatttaattatctccaatttatagttgaacaatgaatctcaaacagatcttgaagaatgtgggaattagcagtggtaataaaagcaattttattttgctccattttagcctgtgtcatagagtggatgtactgttcctatgctgtgattcataagtgctcagatgccaactgccatgagtatgggagccacccttcctgcttagtgctggcaaagttctcccaaatggactctgcagagtccattttgctctcttttggcttaaaatagtttaaaagacacatagtagaagtaatcagtaggaatgattaaatatttgtaaatgaggcattttgaaggatagatgagagattcgaggtttcttaacataggaatgagagggctactgagaaacgaatagtcttctagaacagtgcttctcagatttaatatgtctagggactttgtcagatgcagattctgatttcgataggacagagatggctcctgaaattgtgctcccaggtgataccgctccttgaaccacactttaagaagccagccactagtatgcatagggatggatattctttgaatgggtaagggagcttctgtcagtttcctctgaccacagcctaggcaatgactgaacactagtagcaactgtctgagtcactagaaattgctattaaacatatctttctgggaagatttttgttatagaatatatagtggttttatgaaagcatgtgtcactttttttttttttttttttgagacggagtctcgctctgtcgcccaggctggagtgcggtggcgcaatctcggctcactgcaagctccgcctttcgggttcacgccattctcctgcctcagcctcctgagtagctgagactacaggcgcccgccaccacgcctggctaattttttgtatttttagtagagacggggtttcaccgtgttagccaggatggtcaccatctcctgacctcgtgatccgcccacctcggcctcccaaagtgctgggattacaggcgtcagccaccgcgcccggccgcatgtgtcactttttaatgtcgtgtcacactctaaagcataacttaatggcacccataagaatgagaaaaaaaacagccatcagataaggtgttccattatgcggaaaatcacaaatgaggaagttcaccagttactttggtcaggtgtatgcacgaatcgtagataaatatttcttgctagttctcccttttttcttcaagttggagaagtggtggttaaaacagacagacgggtacacatttttttgttgttgttggttgtaaagaaaatgtgacagctttagattcctgcttttttagcgtagttacagaactccaggttatcatacgagtatcagcatccttagattcaccatttatttccctaagttgaattttcagcatttttatatagtccattctacatggtttctctctccttaaaagcaaatcttgtttgcggatttagtatgactgccctgtctgaggaggtttctgtttttgcaaaaaaatctttttgagcttttttaccttctgtgaaatgattaaaactggcttttgtaaatatgggtagaaagattatgaagaatagaagaactaatgtagagatggaatttacatttttttttctgaatgactttctttgttctattagtacacatgtaattttcagatattttaaatgctttcaggtattttaagtgctatatatattatttcgtcagtctaattgtttagtgttattatcctgagtggttttagaaaatatttctttgttttgtgggtagaatttctccctctactgatttttttttctgtaactttacagttgtgacagacataaatctgctactaattatacttggtatattttaaaaagagccattgtgtatttctataaataaacttgcacaatggtgggcctatcagaggtactgaaaaatactgttcttaactattttaatataaggtatctatttttaagcacacaggatttctcacaatgttaaacaaaatgccatttctttaaaagcagagactgctctcacatggtcacaatcctttgttttattgttgttgctattcttaaatcccttaatgttgtgacagaatatttccatgtgctccctaattttgagaattaatttgcaagattaaaaaaaacccatattagttatagtaactggtcctatagtcattatactggtatctggctcttcaaccggtaaaattccaccttcgtcctgcaacaggggtcctcccattggttttacacacttcaattgagtatatttaaaatattacttcattatactttgcatttaaaaggaactaaacacatagttcttatgtgaatttacttctgtagagcctgttgatttaagattagaaacagtccagtttgccaaggttcagaaatcaaaccaagttaggacactataccagatttgtggcattttagtgcaaaagatacattttcattaaaaagtacaatgtggatgaaccgataaataggtcaataaaataattatttgaggtttcatctggtttactcttgatgttgtacaatctgtaggcttgaacaaaggtataataacatatatctaccactataatatcaaacagagtggtttactaccctaaaaaccctgttctccacctgttcatcccttcctcccaccacctcctggtaaccactgatctttcaactgtctccatagttttgccttttccagatgtcatatagttggaatcatacagtatgtagccttttcaggttggcttctttcacttagtaatatgcatttacgtttcctccatatcttttcatggcttgatagccctttgttagagttgaatattattccattatctgaatataccacagtttatttgttcattcaactactaaaggacactaggttgcttccaagttttggcaattaataaagctgctataagcatccacacacagatttttgtgcaagcatgttttcagttctttgagtaaatgccaaggaactaaatgttggattgtattgcatgtttacttttgaaagaaattgctaaattgtcttccaaagtggctgtgccattttgcattcgcaccagcaatgaattggagttcttgtttcttgacatattcatcagtatttggtgtcttcagcatttaaattttagccattctaatgtgtgtagtagaatctcattgttgttttaatttgaaatttcctataacatctgatatttatcatattttctttttcgtttgttgtttgagacagagtctcactgtgttgcccaggctgagcacccactatagtttaaggagagaaaactgctaggaaatattacaagaagtaacccaaggctccctctctagagttcaaggcagagtaagaggtcttggcttgagataagtattttaaatttgagtgtgtgtgtgtgtgtgtgtcatacaaagattgagagagacaaattgagagaattaatttttatcctcaggagtgaataaaatcatgtagggaaagagtgttcatagaaaagcaaagaggaccaggtatatctctggagttttccagcatgtttatgggtctagtcaaggaagaggagccagccaaagacatgaagaagaagctgccagtgaatgtgagataggagaccagcctggaggaggaaatgtttcaaggaaagcatggctgtgctagttgctgctgaggaagggatcaaggaaaatgagacagagatttagccttagcaaaccattgctcattggcagcctccataagatctgtttgactggagtgatcagatgaaagcctgatgggaatgagttgtagagcaaataggaggtcaagaaagtggagacaatgcaaggcatataataactcttctgaggactttccattgaaaagagaaacaaggtggtagctggagaaaaaataagtattatttttagatgggtaataactgagatatgtttatatctcagagtgattctgtttctgcagttgatatcagtgaccattttaagtctcttaaaatactttcatccgtaatttctgttacacaacacttaattgcttctcttcctacctgggctggtttattctgtccttttgctcagtcacctactctccaagagatgactaccatgtatagttgtgcaggttgtaaatggtaggaacataagcggcacagtttacaccaactaccttgtaaattgtgtctccagagtcataccgtgcacacttagtctaactctatgagctgacccttattaccagccccagaacacaatttttatttgaagcacatggaaacaaattctatgttggtgttgtgggcctacagtaagtagtggaagcgtggttaaccaatcctgaagctacaccacagtagcaataatactatacctacagaagaaaaatgaatcagatgcagtagaaaatgttggattcctaaaaaatgtccacccccaactaaaatcattgtcaaaaataataaaacaacaagagcttttctccctccatttaggcttcattttcaaagcaacaaactgaagtataggtagtaaatttctacattgagagtcagtttgcaagttggagagaaagcactgcaaatccaccctgcctgttcaaaacataagaagcaccagttaaaatctacctatattagggaaaaaaagaaaaaaaaacttcaattaacaacttgactaaatgaaacaattgaaaaaaatagaatgttccttacacattacaacatggatgaatctcaaaacagctatcctgagtgaaaagtcagacaacaatataatttatactatatgattacattatataaattttagaaaatgcaaagtatagtaacacaaagcagatcagtggttgcctgtggggaggagaggggcagcagaaagggattaccaaggggcacaaggaaacttttagggtgatggacatgttcattatcttgactggtcatggtttcattggtatatacatatgtcaaaacttatcaaactgtatactttcaatacgtgcagttttattgtatgtcaattagatctccatgaagctgtaaaaaaaaaatgaaaaaaggaaacttggtttctgaatgtctgaaattgatttgtgtaggttttcatctaatactaaaaagtgaggggccagtgctgtggctcaggcctgtaatcccagcactttgggaggccaaggcaggtgcattgcttgagctcagtagttcaagatcagctaggcaacatggtgaaatcctatctctaccaaacatacaaaaattagctgggcgtggtggctaatgcctgcagtcccagctactcaggaggctgagatgggaggattgcttgagccaagtaggtcaaggcttcagtaagccatggtcctgccactgcactccagcctgggcaatagagctagactctgtctcaaaagagagagaagggggcagaaaggaagggagggaaggtatggggcggggggaagagagagagagagagaaagagagagagagaaagtgaggccggccatggtggctcatgcctgtaatcccagcactttgggaggccaaggcaggtggatcatgaggtcaggaaatcaagaccatcctggccaacatggtgaaaccccatctctactaaaaatacaaaaattagctgggcaccgtggcgcatacctgtagttccagctacttgggaggctgaggcaggagaatcccttgaatccaggaggcagaagttgaagtgaacagagatcaggccactgcactccagtctgttgatagagcgagactctgtctcaaaaaaaaaaaaaaaaaaaaaaaaaaaagaaagaaaaagaaagaaaagaaagtgaaagcaatgcaagggtaaacattttgcagaatagcagtgaaaatgtgattagaatgttacaagattcataaaaccaactgccatttaaaaactgcaagcaatttctttcacattccagttgcatttacgaatccacctttaaggaaagtatgtatgttgtctttgcttattaccagaacccacaaagcagtatatttctttcgcctctatgacaccttgaactagctggggttccaaagttcatcatctctgcatatgtaacaaaaattcatttcaaattcatctttgacaactcttatgaacaatgtctttgtagttcttgcggctgtgtgaactagtttatctctgattaaggttcatgctgcatttcctgctatatatgaacattgtcctgaaaccactgcctttgtctcataaacatttaaggaatgggtaaagcagggactaacaagaaccagaagcagcaactcctggttatacttttttattccctttatcttccactcctagtatacctatgtagcctgtggaaacatcataaattcttgttgactgacactgacaaacttaattaacttacacattttacttaacaacaacaatgacaacaagagaagcaacatattaacaatactttgaaatcattgggtggacacactaggtgtgatctaccatcctcagggatttaaactgcccttgtgcaaacatactttataaattgaaacctggcaggcacccagggagtggttatggtctgcatttattgctgaactttggcccaacaccctcaaatgattggtggcattctgggaatagttagctgggtggagatgagcatgtctcagcagaataatttggtattattagcatgacatttgatattaaatatagtataataatcagggatcactgttacttgactcagagaagtcacaaacttaaaaagcattaaaacaagttaatccaaattagtcaaaaacaaatacaagaatgactctggttcaatttgattgctgattagataattaacaattttgagaaataagcttgataataatagttactagagtaaaataggtttttattgttgttgttttgtgtcttttcggagagctgagctaggctggagttgggggagaagagatgctataggtatatgctatactgttttttctctccagaccatgaatttaatcagttactgttgtgcatatgtggaaaattacaaaataaaacattctgtaattgattgaatttcatagttgactacataattatgaaaggaaataaaataggaccacaaatgtttatttctatcttcctaagtcataggacaaaaagatctaggcatctacaatagatcaaataaaaagaagaagttaacttttaattttcttaaacttttggaggcattgttcaagacagattggtgacaggaaattgcatactaatttgtagtgaagactaataatctccaagactctctgaagattcaaattccttcagccattaggaagctttaaaaatgtagaatatatactttttaaaatccagacttaaaaatggaaacttaggtggtaatttactgactttaaagatgattttctttgtgttttagataccatttactttccttgactttccagaaggcctggggaggcagaaaaacacatataactcttggctgtatctctgtgtaacttagctactataaattctggacgacacgggtcatggagcaaataaactacacttaggctactgagtttcacaaagctatctggttttatgttactgtgttattcagattcatcttaaattgaaattatcacaaaatattcatttgcattttcattactgggtatagtctacttattttttcatcaaagcatttaaatgttatatttgtctgtttcaggactcatgcccgttgcacagcagccggtttattgtgcttcaaagcatggcatagttggattcacacgctcagcagcggtgaggctacaacaaccgtcatatctcattttctctttgtacacatttataaaacatgaattctgtagagaggaatcacttgagaaatcacttggatgaaaggtggaaaaatgacatacctccatctcaattataaaaagttatcagatcacataaagaaccaaataaataatagatcatttttaaatgaagtggattctaaatacagatgtgttatttaaaaaaaatgtattaaggataagtaatggggagatagtacttatttccaaaaatgaccccaaatggaaatattattaacttcagcttttctgaaatgcaagatgcaataggccccagccattatttgtcaccagagatacgatgaaaaggagtgagaacatggagctggaaggaggggtggggccaggcatttacttgatagagtggtcaaggataatgtctccatggaggcctagggtgaaaggtgcacagaccttagaaaaatactttagacctaattgatcacatgcattgacagcatgaggtgagaatgcctgcctttttataactcacaaaagagacgcttgaaaggggcctggcaagcaaagggaatgtagtttgaggtatgactcaagacaccagcacaggagctagaccaaaagcagctatgggccactgttgtgagcttggattttatttcaagggcaaccatccatggggcttttacacgcaggagtgataagatcagatttcctttttaagaagaccattctgtctgcttttgcaaattgtgttacaaaagacaagtgtaaaagcggaaagaacagttgtagggggtctctgggtggttcatctaggtgagacaaagagagcagctagagagatgaagagaaaaatattagtaatcaaagaattagtaggagacagaaaaaacagatgcacaaatgttaactgttcagtcaaaatggaagataagtagttctcacactcttaaattgattggaaattattgcttaatttgcaaagacataatcttcagacagacttcttataaacacataaagctctcttacaaagcaaagtaaacctgaaagaccagaaattttatatttaaaattacaagactggaaacttctacagtcaattctcagtatgcatggtggttatgttccatgaagtcacttacaaacactacattagtgactactgaaccattgcttttaggggaaatagagggttaagttcctgaaagcctctggtcacaaaactccaatcaaccagtcaatacataaccttattttatgtgtattcctgtttaaagaaccttatttatcataggttgtatgaacattgaactcattactaaagcacttattactcatgcctgatcaaaatttatctaacacaaatattttctgtacaggacatcagtcttcttacactaaggaacactacacagcacttctgcagtgggtttggcagccattttaaacagcagaatcaccaataaaaaagcacaaaattagaaaaacatggcacgacagagtatagtcttacttgacctcagcaggaacatgcacatcggtgactcaaatttctcactgccctgtgcatgtccacaaataactacaaatgctccacaagtattgatttccagggttacaagtaaattttagcaagcaaatttaacaaatttgtttatatgtaatccatgaataatgagaattgactaattttttaataattgcaaataaaatcaatagtttgtaaattaagccaaataatgttagtctgaaaatacttaaattgtcttccagataggacagattattaagagtgtctttagaatcaaagttctaaacattttcactaaaagtctttttaattaagtattatttgttatacaaccaccatatttgaaataacacttgggatatcgattctaagtctcagctacttagcttcaggctcctgcagagttcagtagataagagaagcttacataattgtttccaggagttgtccagtaatactgatttttaaaaaaaattaattaggtgagattttcaggaattaatacaatactttatgtatgtgttattttactatctatttaccagtcattgttacatagctgggaggatatctaattagtattttttacatcagaaaattgtaagatgctttaatgatcagtttgtcctgtgctatatgtttatgaaactgctgaaacctacaaccttctaattggcagttggctgctaatcttatgaacagtggtgtgagactgaatgccatttgtccaggctttgttaacacagccatccttgaatcaattgaaaaagaagaaaacatgggacaatatatagaatataaggatcatatcaaggatatgattaaatactatggaattttggagtaagtaaaactatgtctattttcttttaaatgatgaagcaaagcattatttagataagctataaaaagggaagaaataagcttatacagttgagaaatgaacacaagcttcaaacttttggtttggcaaactctctgggagaaaatatatttttctgggtttataaatagaatgtaagtttatacattatgaatgttactttgaaatatgtaaaatgcttcattactaccatcagtcataaagttgatatttagtcacctttgaaggcaatgataccttctctgcctaaattccaagcaatattcaaatatagtctgtgaaatattgcaagtttccatgacttcaaccacttttataagaaatagttgatacacacacatacatggacacatactttctcagtgaattatgtctgaattcaagcaactgaggatttcatgaatcatagttatcatgttgaaggaatcagacctgagatcaaatcttggctctaccactaaccatgaacttacccatcatacctctagatgcttcaattttctcacatataaaatagagataatacaacagacttagggactttgaaaaacttaaataaaatgatacatacaaggtacttaaaatggtaactggtaaaaaataaaattttcagtaaatgctagctgttaccaatcatatttctacactaataacatctatatctggtaagtctaagatctactgatacgataaagatgagaaaatgatcatttgctcagtgaaaataatgagtataaattcctcctgccaaaatgatggaaggttacagctaaatttatcaaataatttagttaatatccaattgaaagaaatctaattgaataaattagataaataagatatctaatctagatatctaatatggaattaaataaaaattggaagtagcaatagtttaatgacacacatttccctataacatgttcaacttaatagattcttcagaaaataacttaaaatgaagtggtaatatgcctcattctttcgtttcaaaatactgttttctttatttttagcccaccattgattgccaatggattgataacactcattgaagatgatgctttaaatggtgctattatgaagatcacaacttctaagggaattcattttcaagactatgatacaactccatttcaagcaaaaacccaatgaacagcttatgtgttagccatagctgaaaataagcacaaatagcttatattcagatcctatcttcatttgaatatagcttttaaatgaaatgttacagtttgaagttttccttcatgcacttggtgataaacgttttctaaatttttagttaagtatatggataaaaagttatgaactattaaaaatgtgatgtggaccaaaggctaggttgtaatcttgatagtctaaaaaatgatcaaaacaaatgattttcaaggaatattcaatattctgcctttcagaaagtgtatttatatctgtgcttcataaatattaatgttcttcagaacatcattttaaaggagatacttgaattgttatttaaatcaaaccagatgtaaaacactcacatacaagttcatactttaaaagaggaaagctacttaacaatgacaaatatttcacaataataatttttacttatataccatctttcaactgaacatttcagttcttccaagagcttcttagagtagtatattttgggggcagtcaaggaataaactacagtgtaaacatatcccagatgaaaactgctgtatggaaaaatgacagaaagtaactgattgacactgttgattcacagttcagcctcctatctgggaaagacatttctttcctctgctcactttaagaacttttaccgactccaaaaatctcaggaattaaacttttaacagttacagcaataaagaatagttagtactccaaaaatattatatttaagatgctcaacaagaaaaaaatgcaaatgtaatatttttttcaaattacttctttattgacttgtccaaatttcaaaagtgcctacccttcaataaaacttttttattctgatctccataaattacttagtcttctatgtatagctatcaaggaaataaaaccaattttgccacagccacaactgtaaatgtttttgtacccatgctgaaactcataacaacacagacataaaaatagctgtgaggttttgctttttttgttgtcagctatcttaagaatcattaaatacacctgctttgggtaaaactctttgcaagcagtaattaacactagtaacagtgaaagcacaagatttccaaatcagtcgttttctcaaaaaaatatcgtataagtgactcatcctgtctgctaactccagacctcccagcttgaagccaaatctttccatgtgagattgatatggatttcctagaagtactggaatgttgtcatatcttgccctattttaattctgctatagaaaacaattgccttcacttttaaggagtaatttgaatattaataactctggtctagattttcatataatgtattaaagacaaagtagtgaacatcaatgaacatctgatagagataaactgtaatcaggcataagcttgtttgtatgttctggcagtgactaatcagtaaatgatgtcggtttgcccagtatcacttatcttctgtatttttcctctgtcgtgtaaatagtataaccttttcatttatggacaattttttggactagtagccttcaatatacattctgctttgaattaattttttcaaatcaataaattatgtagacatttaaaatcaaatatcaagtagaattgaaaaatgtgagttacataagttaaaaacttactttaaatcttaccttctataggtagctctaaataaattcatatggttatatggcatctctggtgtatactgattgagaaaataattaaactgaagttaggggagggg

SEQ ID NO: 404 - DNA, 2169 bp, Homo sapiens
ggcgtggcccagccgcccggctgcaaggtggggtgtccccgccgctcggatccccatctcacctgccgcgggcgaggtggccccgccgcttcctgcgctcacctcgggtccctccctcccgggccaggtttggccgcggcagccgcccctgggcgcccgcgcccggacccgcggtttcggtcagacccgcccgcgggctggtttcgattagggccagtaggagggcggagcggccgggacgccaggagggaactagcctaagtggggacggtccccgtgcaggagacaaagagcgtccctggagcgatcagggctcaggagcccgacccggagcccggggcgtccgcgctgacttcgggtccccggagcctggggcacggcagggagaagacgacggcggagaaggcgacagcggagaaggaaggcaggctgcaggggcgccgtcggcgcggcgggccgggatgcggacgccggtggtgatgacgctgggcatggtgttggcgccctgcgggctcctgctcaacctgaccggcaccctggcgcccggctggcggctggtgaagggcttcctgaaccagccagtggacgtggagttgtaccagggcctgtgggacatgtgtcgcgagcagagcagccgcgagcgcgagtgcggccagacggaccagtggggctacttcgaggcccagcccgtgctggtggcgcgggcactcatggtcacctcgctggccgccacggtcctggggcttctgctggcgtcgctgggcgtgcgctgctggcaggacgagcccaacttcgtgctggcagggctctcgggcgtcgtgctcttcgtcgctggcctcctcggcctcatcccggtgtcctggtacaaccacttcttgggggaccgcgacgtgctgcccgccccggccagcccggtcacggtgcaggtcagctacagcctggtcctgggctacctgggcagctgcctcctgctgctgggcggcttctcgctggcgctcagcttcgcgccctggtgcgacgagcgttgtcgccgccgccgcaagggaccctccgccgggcctcgccgcagcagcgtcagcaccatccaagtggagtggcccgagcccgacctggcgcccgccatcaagtactacagcgacggccagcaccgaccgccgcctgcccagcaccgcaagcccaagcccaagcccaaggtcggcttccccatgccgcggccgcggcccaaggcctacaccaactcggtggacgtcctcgacggggaggggtgggagtcccaggacgctccctcgtgcagcacccacccctgcgacagctcgctgccctgcgactccgacctctagacgcttgtagagcctggggggcgccgggtggcaaaggactcacccccgcacaggcccgcctggcttcgagttggaacccggacacttgcccctcactggtgtggatggaaatctgcctttcgtgggaccaaacaggactccttggacgattagttcaggttgggtttggttttcttcttaaagagtttagttttcctctccagagggatcagggtcctcttagggagtgacgggcttttcatatatttttgctgaagaatatatggaaagggtggcatttgcgtcacgtggaccagggacagtgctgaaatcagcagtgctcagaaacaatttaacatgttgaaacgacaatattctaaaatactgatgaatcttgcatcaatataattattgggttttttttctttttcctgctgtataactccttgccatgcaaactctcaagaggccaatatattcctggccatgtttgaatgagcctcttaaaataaacttagagccatgcaaatgccagcagcttaatggatttcatggaatgaaataccgtgattaactcatagctacatatcattgcataaatgggatttatcttttttctcacttatttttgcggtgaaagtcgagggcatgcaagagtttctcttccagaagccaagaggagaacaaaggtcctaatgctgtactattccaccctttggacgcctcatccaggacgcagaggactctaggtttaacattttgtacaaaatggaacctgttaatcatattaaagcacatatgtatatatcttttatttataaataaaattttaaaacaatagtttcagtat

SEQ ID NO: 405 - DNA, 87513 bp, Homo sapiens
caggagcatgacgagggagagaggtcatcgaggctggggtgagacatctgacttaccgtcaggagccacgtcagtgcctcataaaatccaatctccattcaggtgagcgccacaccctgtctgtgcaaagacactataacaactgtcctttctcttgtgattctattgacagcagccagcaactcacccgtgtctatccagcagcagacacaccattctgtgccctcatattttgatatgtaacaatctgacttaccttcatgtggacaacatgaaacagcatatgaaatgaatgccgaaactaagcatcactacttaaaatatttatacaaatttaaaattttaaacacagatttaatttgtttttatttatttctctgttgatcttttttttttttccctctctctgatatgttgctaattttcctgtgttctgttcttcactttgttaaatcctaggataaactcagactgggatatgcatggttcctttctcacgtgccttttgctacagagctgttctgatgctggtcatctgactgtctcttctacttcctgttattatctgaaaatggtagttaaaagcttggctttcagtaactattcagacaggtttgaagaacagtcactagcaatccccaggtgacatttcagtaatggcttcatatagtctgaaaatcagagagaaggtcagtttctttaagcagacttgctatctgggagttcacttctctctgggatatactttccaagaccctgcctttaactgttagccatctttcagtcacccatgctcaatacactcattcacttagcaaatatttattgagctcatactaagtgcttggcttagttctagatgttgggcatatagaatttaacaatgaacaatttccttgttttcatgtaggagagaggagaaagaacaataaacaaatacatatgtaatatactgttaggaaaagtacgaagaaatgtaacatgttaataggctggagagtaaggagatggagagggtggttatttaagatgaagcagtcagggaggtctctctgggaaggtgacaagagagtggacattggaaagatgggagagtgtgagccatatgaatgtctagggagaagggcattctggacagagtgacaatccagcacagaatgagcttgatctgctgtaggaaaaggaagaaggtcaatttggtcaaactggcagaagtgagccagaaaataaaaagaggtgaaactggagaaataggcaaaagccagttattttagaccttataggacatggtaaggagtttgggtttcattcaaagtattatgggaagcctattatggtggctcactcttgtaaacacaaaactttgggaggtcaaggcaggagtattgcttggacctaggagttggaggacagcctcggcaatgtagtgagactcccatgtctacgaaaaataaaaaattagcctggcttgacgttgcacacttgtagtcccagctactcaggttgctgaggcaggaggactgcttgagccaggaggtcgaggctgcagtaagctgtgattatgctactgtactccatcctgtgtgacagagcaagaccctatctcaaaaaacaaaacaaaaacaacaaccaaaatccaaagtgttatgtaggactttgaggcaggggtgaggcattatctgatttatgttttaggcagatcattctagttgctatctggagacctgaccacttaagagtataaaaggaatcagggagtccaggtgcaagcctaccgcagggatttaggtgaacaaagatggtttctttggtatagatagcagcagtgaaagtggtaaacagtggtgaagtttgaaataaattttgaaggtggaataaatggaagtttctgatgagttggaggtgtggtgtaaagaaaagagtaaaaatatctcctatgccttgagtctgaaaaactaggtgaatattggggccatttattgaaacaaggaagtgtggagaggctgactagggttcaccaagcatagatgtcaagtaggcagctggagatttaagccaatgtaaagatgtaggtttgagattcaatatctaaatgtatttaaagccatggaactgagtgagaccactcaaggagaggggagtagatagacaagagtgttgaagactgaggtaaaatgttggaagaagtaaaggagtcatcaatagaggcagaatggagatgtccagtgagatctgaagaattttcaaggggaaggaggtgataacctgctacaatgatggttacaggtaaattaagatggagatcactggtgtctggagaaggccaagttcaggggagtgagaggggtgaacactcaatcagtgtgtgctgaaaccacaatgagagccaaggaagtgaagacagtaagaacagacaactctatttagaggtttttctctaaagggttgctgaggaacaaagcagtagttggaggtgaattaagggagtctaaggagggatctttacttgcttatgagagatattacagaaatattatatggttcccttcagagagctgagttttaagggcaaagatacagaacttggagggcagagtttgctctctgctccctgcagaaacactccaagagacttttgcctgagaacttagcttgcatagaaggaatggagtccagcagctggggtcagcatagccaacattattgggcattttgggatgatcttcagatctgcattttgtcctgaagtttcacagtgaagttctaattgggtagcccaatcatgtagcctttgtaaccccacatgtgctattttcccctggtaactggtgaaagtgaatgtaaatagtggattagtgtggtttgaggtctatggagtgtaataggccagtgtggttgtgttctaggtgagagtgcaagatcaaagggcaaatccatgtgcccccttctcaagatggggataacaagggagaacgtattgatgctagtctgtctttttttgtctgctgttaccttttcttccttgtttttgagaagttctcaggctctcttcaacaccatcccaccaggaaagtaagttaacatgaactgacctatcctgatgtaaacaaaaagagtgaaactctgaaatatttgagatttattttgattcaaacatgagtgatcagtggcctgcgacacagccctcaggagatactgaggacatgtgcccaaggtggtcaaagcacagcctagttgtatacattttgggaaacatgagacatcaattaaccacatttaagatgtaaattagtttggtccagaaaggcaggacaatttgaagcaggggaccgtgagggggagaggggtttcaggttataggtagatttaaaatttttctgattggcaattgattgaaatagttattatcaataaaaagaaatgtctgggttatgataaagtgttgtggagaccaaagttttatcttgcagatgaagcctccaggtagcaggcttcagagataacagattataaacgtttctcatcacacttaagatctgtgttgatattaaacgctggctgggttttcctgaattctaaaagggaagagggtataatgagccatgtctgaccccacttcccaccatggcctaaatcagcttttcaggttaactttggagtgccctggcctagaggaggggcccattcagatggttggcggtggggtgcggtgggggcttagagttttaattttggtgtacaggttttatacttcttctcttcttttcccattttaaaagaggtggctgaaatttacctcatgaataaaaactgggaaattgtgacatcaaatattataaatgtagggagaggtggagtagaagtgtagagtttttttaatgctatcaaagtcaagttatcagcttatcaccattataagatttttttgtaagcctcatggtgctcatggtaaccacaaagcaaaaacctatagtaagtaaaaaaggatttttttaaaaaagaaatcaaaacatataagcataacactggaggaaatttcttaatcacaaagaaagaccaacaagagaagaaaaaaacaaaggttctacaaaacaatcagaaaactatttaaaaaatggcaatagcaaatccttatctatcaataattatcttgagtttaaaagaattaaattcttccatcaaaagtcatagagtggctgaatgaataaaaaaaaacacccaatcataacctgcctacaagagactcacttcatctgtaagaatacaacacatagaatgaaagtgatataaatggaaaccaagagaaagcaggaatagctatacttagaacaggtaaaataaattttaagtcaaaaagtgtaaaatgaaacaaagaaggtcattatgtaatgataagaggttaatttagccaaaggacataacgaatgtaaatatatacatgcccacacaaaagtacctaaatatatacagcaaatagtaatagatctgaaggaagagattagactataacacaataacagtaagagattgctatacttaacttttagcaatggacagatcatccacatagaaaaatcaataaggaaacactagccttagactataccttagaccaaatggacctaacagacatacacaggacattccttgcaatagctgcagaatacacattcttcttaagcacaaaaggaacattctccaggacagataatatgtaatcatatatgccacaaaatatgtcttaacaaatttaagaagattgaaatcatatcaaatatcttttttgaacagaatgatataaaactagaaatcaagagaaattttggaaaactcacaaacacatagaaatattcaataaaagatctagtctgtaatccagaactactgagtcaaagcttccaactgtgagggctaagaagttttgttttaaaaatttctgatatggcaagttcaataatatgaaatctagctagaactagtgataacgtttggtagatttaccccaaattattctttgtgaataattttatttattcattttatatacaattatgggatgatattgtatattgtatttgtattcaggcagaaccccaagcccaattagcttaagcaaacagagtttattggcttatgactgagaagtctaaagctggttctgactttaataactactcaacctagggtgtctgatatcttcaccatctttatttgggagttaaggcctttcttttccttaaccaagttctaggaagaaaaggtccaggacttgttttcattagcctgtctttcatgatgtaccaaggaaatgagttaccttaatttaatctaattaacgtttttgacctatgtgggttggagtcaaagcaccacttgaaacacgtgagatgtttttcccataggaaagggaagttctattagcagaagaaggaggggaaagacatctgctgatcagaagaaaataacagatgtgattaacacgcactacatagttctgcttcctgctgttttcacttaatgttgtatactcatcactttttcatatcctcaaaaattctttgaaaatctgatattttattaccacacaatattctactttatatggacagtctattggttatcaattgctgcaaaataaattaccctcaacagcgtaaaacaacaaaaaatctattatatcctatagtttctcagtgtcaggaatacctgagtggcttagctgggtagttttggccacattctgtcatgagtttgcagtcaagctgtccgctagagggaagatgttggtcaaagggcacacaatttcagttatataagataaataagtcctagagacctactgtacagcatagcacctgtagttaaagatactgtattgaatacctaattttctaagagcatagatcctaaatgctcttatcacaaaataaaatataaaataaaagaggctcctgctttttgtctttccacattctgccccaggccatctcccaggccctgggaacatctttggcttgtgcaagagcagatcagaagtgccaggggttaaagcccttgagaccaacccttgggagaatggtgttggagtatttgctccgccttccatctttcaggtgaaccattcagagaaagtctgtacaccactcagaagtcccagcagaattgaatctccattgctgatggcagggacctcagtaatgcatccttacatgagctctccctgcttcctcatgtccctctccaagctcccttgacctggttccctagtagatctttttaaataaactgcttgcacctagtccttgtctcagggtttgagttcaaggaaatacaaaacaaatcaccctttaaaactatttttaaaaattatatggcatcaatatttcaaacagttatgtagcaaccatcttgttgagctaaactcaaagtcccagaaaagggaacaaggattctttactgtcatactaagtaaatgtaatattgtgtacataccctgtcttactgtgtttttgaattagttaaaagccatctccatattttcttaagtaaacacattatagccaattgcacaatagatgctaacagaaaacattacttttcagatatggaatgttctaagcaatatatttcaaagattgtaagagattttcctccaagaaaatgagagtaattaaaatcctccgtatttggcatcctctttcctgggatgattaaggcctccagctcttggcaggtcaagccattaaggaaatctgtgtggccatttgaacaggaaggattatacactgactacagttatcactggtccagaggtagaacatgccaaaactactattcaggataattttgaacttgctgatatgtcaatttcagtaaacagagtaacaaaggacagcctgaagtttcctgggctggtgatgtgtgaacccccacgattctatgcaagtccaattgctagagaagtggcttcaaatcaactctaaattactttgggcatataggaggaggggaaggaagatggctactccattagtcctctttatccttaatttttacaaattgtgtgtatactttacgcagtagaaatttacactacaaattctgaataaatcaacatgctatcattgtttaccatcactataaaatggtggaagagtaagtccatttattcatgcagagatgaaacagttttaaatttatattttaacctcattaaaattctcaacttacaaaaagaactactagccaatctcttagcccaagtgtctgttaaaacacttgtttgtttgggaacttaactgaaaacacaattctcaaggaaattggcagaattataactataagcttatagtgactcaatatatattaaaaagttaaggtaaaaaatataagaaaatgctaatatgtaaacactgcaaatattttagtgaagtagaaaatacttctatcatataaggaaccagtctaatttatgcttagatttttcacatattgaattttgtggtcaatgactaattactcttgtttctaaaatgaatgacataattttagctaaaagcatagaaacttggggatctagcaagcatttgcagcattatagtgagcaaatgaagatatgctttttagaaaacactatcttaaagaaacttctcagacttttattgttactttcaaggacaccttgagtgtctgaagactctagattaagatccactggtttggcttgcagattctttctcttggaaatctgcctgggtcatatggtgcaaatcaaggctagggccctggtaacctaaaatgatcaccctcccaatgcctgactatcataaagatcataaaacagcctcagagacgagttcatagcaaagtccactctagaggcaattctcttacaagtggatcctgcagggcgatatgtttgattagcatttatagactgaagtttccctttgtgaggtcagagctggactgtctgctgttcctgcctgtgctgaggcctgatcatcagcttggcagtaggtcaccaggaagctttactttaagttccaagacagagaattttagattttctgctttccagactacccaccatccccatggaaatggaaatccactccaaatcccacctaaacacacacacacacacacacacacacacgcacacacacacacacacatgcatgagcagaaaatagacttattgatacactttcctgagcacaggcctacaaaatgctttttcgtttttgacatctaatgatttaagatgtggcctatacctagagaagagctaaatatcaggacaaacattctcttctttttcctagtcttttcttctttttcattgaaaaagctaaatgctgaattcacaatttttatagtgaagccagcttatctttttcagatcctaacactcagactcttaagtagctggctttagttcttaaaataaaattggtaacttttttctcctaactcacctttttaaaaaaacaccccaaagggagttctttttgcattttgggcaattcactttaggattacaataattcaaaaaatgtgtgaatatgtatcttggtcaacagaatagcatctggaattccagcatgcaacctgtcagtgtagcagagacatctggtttctgtgtaaccgtagtgtttgtttagttttcttaactctacggtggacaaaaggtctgttgctataatttgatactgaaaaattttcagggttagctttcttgctcgtcccttcctttttttgtctctattttatttttttaagtttagagtcatagtacgaggattttcagggatattactgatatgactgccccagcaagaacactaccatcacagagattctgctttcatcccaaggacaactctgatgcctttcactttctgtgctcttcctactggctttgagtcctcaatggttagaaggtcacttgctttaaagagaacttgataaaacagccaagagggactcaaaggtttgagctctctgtttccctctggtctttgtcccagacccctccatatgctcttgagtttagcaggcctctgaattaccaaatacacaaagctaaccaatctccactttctcctcctcagaaggctcttctttctcaagccttctggacactttagccctttgcagcagtctgaagttcagtgactgatcacagcttaattaatgacaatattaagcaacattgagcacctgtggtgttggaggcacacactatgttgcatgctatctcttttcatcctcaaggtaactgatgtagagtattattttaattggtgaaccatgaagctgaggttctgtaaagttcagttgcttgcccaagatcattcagctattagagcctggatttgagcccaggcatgttcaatttcagtcttgaaagttagttcactttaagaatgaccactttacccagggattgtagtataagtacccacatgcagcataataaagtagaataaaattctgtattcaggtctggactgtgccatcgcttaggtgtgtaatgggggcaagtctcctaaccttttagagtaccagtgactgctttacaaggtgaaggtcagtcacatctaaggcccctcaccacaccgaggtcctggtatttcctgattctagacaaagggaagaaggaggaattaaacctgggttagggaaagattaaatcatggagagaagggagatcaggatttcctgtaaacttggaggttgagcctggacactgcatatgtagatgaatatgtgtctgaggcagagcgtggacaagtctgactacattgcctaggatgattacctttttgactttagttggtggagtgagagctgcctcttttttctgtagttgagcccctgttctgagctcttgttacaaatgtctccaaagcactcattacccatttccttcttcttctatcctctaatgcacctggcctttacctgaggtccctacaggctctgtacccctgaaatgggaggcacagatgcttagggtgtaggttggggaggaaggagggtatggcgctctggacttcaccccgatggattcttctagccattgagagccagatccttccattatttggagtttcataaacctgtgctgaaggagtcctcttttctcacttttcccagcactcctggccttgtcacctgaacttccccgggacagtgcagggggcttacctgcctgtaagcctttctgcatgcatgtatacaactcacctcagtaaaactctttcctaaagatggtgtcacatgcttatgggttgctctctgaatgctcagataataaaaactatcatttgttgaaggtctattaaagtctcagacattttagtagcagccttagacaagttatctaacttttttttttaattcctcaccaccctcttagtcagctgtcattatcccatttgcttataaggaaattgttgctcagagattttaaatgagcttcacaaagttattcagctagtaacaagcagagtaaatggttttcctgcttgaaataaaagcattgcccttccaaggctatttatcatgaacttgctttcttagctgaaaatgaaagcacatgcgttgatcagattcagtgcacgtatggtgtccactaacagaacacttgaagtcctgattatcctggatgaactgggagacacatttactgaaccactatttcacaatggcctcttttcttatctcattcatgatccctatatgtagtaggtctcagctcgctgctagaaaggaagcaatatgacattatgacaaacgacataatgctgaccaggctgctttatctgactgtctggttttgtgtttgttgtgctttcttttcctctatggtgtaaacagtaaaagacctcaaattatggagggcttcaagaattttcctgttctctttatcattgtttttatgttaaatttgagcacatgagattgccaattggacaaacactcttttcttttccttttttcttgagcaaaacaaaaaaagttctgattttcctatttgccttacctcataggttgaaagcctactttttgctaatgtaatgccatgtaattgtttatttatttctcccttttaataatagattttttaaaggaaagtcaccaaccccaaaagaacttgtaattggtggggcttcaggctgggaaagttttaggattcctctgaaatcacacaccaagtgggcatccatgtgctttaggagtgagtagtcttccaattaccttctgtattacagaggagacaggtggctcaggcctccacaggaatgacttttaagcttgctagtctggtcaccaaggttgctttccctgaaccaactcctggtttttgacccctctgcagactgagtcctctgcttaatcaatttcctgtttttagcttggggtcaagctctaaccccagggctctgcttcctccttcttctctgtggcccccggaagaggaaggctgactcctcagaggaaacagaaactgttcaagtccaagggcacaggtagttggctcagctctcctcactggggacactcactgaatcttgaatgtttgggaatctgggggcagaggaaagggtatgggaggaaataaatccattagaccaaagggtctggtaaaagaggccatagcatcatacttagggctggaaaacctgtgttccagacccagtgaaggaggggaagggaatgacaactgtcctgacatactggtctatgagagtaccctcaggtctaacgaggaattttatatgaattttccacaaagttaacttcagatttgttgattgtccaaagcatgaagctctcaaattttccaagtcatttctcctatttatttatttatgggcaccttttaacacaggtgggaagaagggatgtgaacacatcccagccccatgcccaggcatatgttcttccaatataccactgctacttaactcagatcagtgcaagtgacctgtgtgagcttggacaagtgtctgaaactgagttttctcctgtgtaagtatgggagaaaatacctgctttgtcttccttataaggttgtcatgaggattaaactggttaatatattttctttttttttcaagttatttatgaaaggattgaattttgctcattgttctgcagcctttggggtctctcagtgaacaagatagacaaggaccctgccatcaaggacatttatatttcaaagtgcatcagtatttttcattttttaaagaatgaggtgactctttgttcagttgtaatcttacctagaaatccaacgtgtaaaataaataaaaaggaaatgagaggcaggggctaaagttctgcttgcttatcccagccccagcttcctggtggactttggaagcacagtttggaaactacaagacatttcttcacacatgcaagagacaaaaattaagaacttgatgactcccaaatttgcaaatactctgcatagtagatgctgtgggtgcccactcagaacccctttgctggctggagccgtcactgcaccccctccctcatcctactgccctcagtgttggctactagcaggtcataactgtccctttatccagagctttgtccagacatgaaaataaagaagcacaaggctgttggaaaatccaagggaaaactgtaaattggggcatgttaccaatttccaggatgctgttctaatcatccacactcactgttaaattccaacaccaagattccccagcatttgttaatattctataaactgtaaagtgccaggcaaatgcaaacccagtttttgtagccatgagaaacaggatcagaaatagagtaactgcctttgggcactgattgctcttcctctcctttcactaaagttcaagtaacttgacgggcaaatgtactcatttcaggatactctctgagctgccctgatctgagtgtgcagtgacatagagactacatcactttatcctctcataaagagacagagtgaaatcctgataggattgaacaatagatgagttgcaaaatattagaaagatttaccgttaaaaaaaaatttgtccagctacttgaaattgtgtggatacagttatatttttgttccatgaaacaagacagaaacttataaaacacaataatttaaagtttcataacttacgtattttgaaataatttcaatgaagacagcacctgggtgggattattgtctgaagtaaatattatttgtattgcagcaggaaacgtggtggtgcgctacgctttctcaacccttgaggctggggaagatcatgagtgtaagcaggggtgtgtttgagtgtaacagttagctgaggctgtaaatccctcttgattgtgtcttcctgagacatcttggaggaaaagtgtgaaagtgtgtatgagtgaatatatgtgaatgtgtatatgtgtttacgtgtgtgagtgtatgtaagaggggatatatgtatgaatatgtgtatgtgtgtgtgtgtgtgtgtgtgtaaaaatgggaactaccagaatccaggactgactgtagagtcttctagcctcaaggagtttctctaatactgcagggtgagtgactagtattgtttgcttggccaagagtaaccatctgggatggggttaggggactcatggatgccttatcctacaagctatcacaagctagcaaattgcagagctgggattcaaggtgaagtctccttttcaagagtcatggtcctgaaaagactttgacagctttcatctctgagttgtcacttaggtgttttcctgaattatatcatgttgaagaaaattctatgcattgtcataaacctttaccagcatcctcattgataagggtcctatcataaaacacatgaaaaagcatttgtttaaaggggtgaatgaacagagttgaatggagagtatctataaaagcagggcatgatgaaaagacattgacaaaggatgaagaggcatacagagagaaggagtctttataccctaggcctgaggggaaaggaaagatacaattcccagggaggctgagtgagagcttcaggtgaaggagaggctgcttgctgatcattgtggccttcagcaggggagtgtggccactgccaaaccaaaacctggcagaaagtggccctgatctctccttcctcggtcccttcaatctcctgctggtactttccactggcaaaatcaaatcagaagctgaagaaaaggacaccctcatgatgcggagcagggtgcaaagggtggagaagggtggagagcagatttggagggcaaacagagaacatctgtctcagccatgctgggctctctctaggctgctgcaagcatgagataagcgagccacagtccctctctggctttctggaagagcacagttagtaactgggaaagtgaggtaaggactagggctctgcttataatcatcacccaggtagttactgtcttttatgatgaagagcaaatgacagtttaaaaacagtctagaaattgaaatctttatacataatatacatttaatgtaacagtagcctctgcaccaaaaccctagcattgataggcaataccattcttgtctctttctctgacaggctcttgtaagggaaatgaagaccctgacctttatgctattcagaaatgtggtctcttcgtaggtataaaccatttcactaacagcattaaaaggtgtttatattaatgtagcagtgaggaagaggcatccttccacactccatgcccaacccatgtgccacaccaaattagtgtcctgtcgtctcagaagggggaaaacaattggcaactctacaaaacatggttaaccatgaaatgcgatagtatccaacatcagctgcttaaatatgaaacctgagtcacagctctatgtgtttggcaacagagtaaacatcacatatgtgtgggtatttgtgtgtgtgattttattttatttttttcctgagatggagtctcgctctgttgcccaggctggagtgcagtggcgagatctctgctcactgcaacctccgcctcccaggttcacgccattctcctgcctcagcctcctgagtagctggaagtacaggcacgtgccaccatgccaggctaattttttgtattcttagtagagacggggtttcaccgtgttagccaggatggtctcaatctcctaaccttgtgatccaccggcctcggcttcccaaagtgctgggattacaggcgtgagccactgcgcctggcctgtgtgtgtgattttaaacactgaaaacaaagataaatgatgacggctctatggatccactcctgcattagattatccccttctcatctcagtaagtccctattgtgatgggagtagatgcggagtgggcgcacaacctaagctggggatggtagggctctcatcaccttagtgtccatagcccctgttctgtagaggctgacgacctcagagtgcaggtcccaggaaatctaggggtttgtctgacttgctggttctctgactccctgtgagattggctgcccagtgaaagtgggtaaggaatttcatctttaattctgcagctcagtctcaacttaaaactctactcggagaatgaggaagaattcaaataatttcttactaaaatagaactgtgaaaggaattgttttggccagaaaagatctattgatttttaaaaaatcagccaaaggcaagaaatatgatgaaacatcttgcatagactgtaggagcccatgattctggcttgatttttctaagaatttgaaactaaattatttcattgtagaagaaagaaaatggtttattgaccctctatgagaatcagtctttcaaggtaaagggtttgtctaaagaaggagccaaagcttgttttggcagtattgctcccatgtgggagtccctgggaaagtgggtaggtgttaaggaaccttcctttgcaaagcaaaactggacagaaatggcatttacaagctcctccaaagcaggcaagtaagaggagatagcagaagatgacagataggaggcaggactagcttgcagctgctgctcagatagacagggcagcatgtggagactcacatcaagaacttttcctccaggaactactgcaggaacataccaggaatgccgagagaatctaaagaactggatcactgctgcaggcttcctgagataccgaaaaactatgagtaggcttgctttctcagcagggaagcttatggtctggggcaaattctgagccctgggcatcggctgcctggaaataaactcgttgctactgtagaagcacagtgggaatgagaccagcctttaggattgttggctgcatgggagcagggtgaggcctgtgatgctggccttcccctacttccctggcaacctgtatgactcagcagaggcagccataattccctgagaatctaactccattggcctaggaatcacacccccatcccccacaacagccacagcaagccctgcccaaggaaagtctgagctcagacaagcctatccctgcccttacctgatggtctttctctacccaccctggcagcggaagacaaaggtcataatctcttgggagttctatggtcctgcccaccacctgagaaacctgaatacaaataggtggccctagggcaagtctacatcctccctatattaccatagctgatgtgctcttgaaagcaccacctcctggctggaggccaaccaacacaaaaccagtgcactaaacaaaaatacaacccaggaccctcacagagtccacttcattcccctgctacctgcaccagaacaggtgctggtatccacggctgaaagacctgaagacagatcacatcacaggactctttgcagacactccccagtaccagccgggagcttggtagctccactgggtggctagacccagaagaggaaaaacgattactacagcttggctctcaggaacccccattcctaggggaagagggagaacaccacatcaagggagcaccctgtgggacaaaagaatctgaacagcagcccttgagtcctggatcttccctctgacatagtcttcccagatgagaaggaaccagaaaaacagctctggtaatatgaaaaaacaaggttctttaacacccccaaaagatcacaccagctcatgagcaatgggtctaaatcaagacaaaatttgaattgccagaaaaagaattcagaaggtcaattgttaagctaatcaaggaggcaccagagaaaggtgaaatccaacctaaaaaaataaaaaaaacatgatacaggacatgaaaggaaagatcttcggtgaaatagacagcataaataaaaaataatcacaacttctggaaatcaaggacacatttagagaaatgcaaatgcactggaaagtctcagctgtagaatcagacaagcagatgaaagaacttcagagctcgaagacaaaacttttgaattaacccaacccgtcaaagacagagaaaaaagaatgaaatgaagaaagaagcctccaagaagtttgggactatgttaaatatccaaacctaagaataattggtgttcctgaggaagaagagaaatctaaaagtttggaaaacatatttgagggaataatcaaggaaaacatccccagccttgctagagatctagacatctaaatagaagaagctcaaagagcacctgggaaattcattacaagaagatcatcacctaggcacatagtcatcaggttatctaatgtcaagatgaaggtaggaatcttaagagatgtgaagcaaaagcatcaggtaacctatgaaggaaagcctatcagattaacaacagatttctcagcagaaatcctacaagctagaagggattgggacccccacttttagcccccttaaacaaaacaattatcagccaagaattttgtaactagtgagactaagcttcataagtgaaggaaagatacagtcttttccagacaaacaaatgctgagagaatttgccaccagcaagcaagcactacaagaactgctaaaaggagctctaaatcctgaaacaaatcctcaaaatacaccaaaacagaacctccttaaagcataaatctcacaggacctacataacaataatacaatggaaaaaaaaacccaaaaacaaaaaacaaggtactcaggcaacaaatagcgtgatgaatagaatagtacctgacatctcaatattaatattgaatataaatggcctaaatacaccacttaaaaaatacagaatggcagaatggacaagaattaaccaagcaagtttctgctgtcttcaggagattcacctaacacttaaggactcatgtaaacttaaggtaaagaggtggaaaaagatatcctatgcaaatgaacaccaaaggggagcaggagtagctattcttgttttttttttttttttttttttatactttaagttctagggtatatgtgcacaacgtgcaggtttgttacatatgtatacacgtgccatgttggtgtgctgcacccattaactcgtcctttacattaggtatttctccgaatgttatccctcccccatctcccaaccccatgacaggtcctggtgtgtgatattccccaccctgtgtccaagtgttctcattgttcaattcccaccgatgagtgagaacatgtggtgtttggttttctgtccttgcgagagtttgctcagaatgatggtttccagcttcatccatgtccctacaaaggacatgaactcatccttttttatggctgcatagtattccatagtgtatatgtgccacattttcttaatccagtctattattgatggacatttggactggttccaagtctttgctattgtgaatagtgccgcaataaacaaacgtgtgcatgtgtctttatagcagcatgatttataatcctttgggtgtatacccagtaacgggatggctgggtcaaatagtatttctagttctagatccctgaggaattgccacactgtcttctacaatggtttaactagtttacagtcccaccaacagtgtaaaagcattcctctttctccacatcgtctccagcacctgttgtttcctgactttttaatgatcgccattctaactggtgtgagatggtatctcattgtgattttgatttgcatttctctgatgaccagtggtgatgagcattttttcatgtgtcagttggctgcataaatgtcttcttttgagaagtgtctgttcatatccttcgcccactttttgatgaggttgtttgattttttcttgtaaacttgtttaagttctttgtagattctggatattagccctttgtcagatgggtacattgcaaaaattttctcccattctgtaggttgcctgtgcactctgatgatagtttcttttgctgtgcagaagctctttagtttaattagatcccatttgtcaattttggcttttgttgccattgcttttggtgttttagacatgaagtccttgcccatgcctatgtcctgaagaattgcctaggttttcttctagggtttttatggttttaggtctaacatgtaagtatttaaaccatcttgagttaatttttgtataaggtgtaaagaagggatccagtttcagctttctacatatggctagccagttttcccagcaccatttattaaacagggactcctttccccatttcttgtttttgtcaggtttgtcaaagaccagatggttgtagatgtgtggtattatttctgagggctctgttctgttccattgggctatatctctgttttggtatcggtaccatgctgttttggttactgtagccttgtagtgtagtttgaagtcaggtagtgtgatgcctccagctttgttcttttggcttacgattgtcttggcaatgcgggctcttttttggttccatatgaactttaaagtagtttttttccaattctgtgaagaaagtcattggtagcttgatggggatggcactgaatctataaattaccttgggcagtatggccattttcatgatatggattcttcctatccatgagcatggaatgttcttccatttgtttgtgtcctcttttttatttctttgagcagtggtttgtagttctccttgaaaagatccttcacatcctttgtaagttgcattcctaggtattttgttctctttgtagtaattgtgaatgggagttcactcatgatttggctctctgtttgttattggtgtagaggaatacttgtgatttttgcacattgattttgtatcctgagactttgctgaagttgtttatcagcttagggagattttgggctgagaagacggggttttctaaatatacaatcatgacaactgcaaacagggacaatttgacttcctcttttcctaattgaataccctttatttctttctcctgcctgattgccctggccagaacttccaacactgtgttgaataggagtggtgagagagggcatccctgtcttgtgccagttttcaaagggaacacttccagtttttgcccattcagtatgatattggctgtgggtttgtcataaatagctcttattattttgagatacgtcccattaatacctagtttattgagagtttttagcatgaagtgctgttgacttctctcaaaggccttttctgtatctcttgagaatcatatggtttttgtctttggttctgtttatatgatggattatgtttattgatttgtgtatgttgaaccagccttgcatcccagggatgaagccaacttgattgtggtggataagctttgtgatgtgctgctggattcagtttgccagtatgttattgaggatttttgcatcgatgttcatcagggatattggtctaaaattctctttttttgttgtgtctctgcccagctttggtatcaggatgatgatgtcctcataaaatgagttagggaggattccatctttttctactgattggaataatttcagaaggaatggtaccagctcctctttgtactgctgacagaatttggctgtgaatctgtctggtcctggactttttttggttggtaggctattaattattgcctcaatttcggagcctgttattggtctattcagggattcaacttcttcctggtttagtcttgggagggtggatgtgtccaggaatttatccatttcttctaggttttctagtttatttgtgtagaggtgtttatagtattctctgatggtagtttgtatttccgtgggtttggtggtgatatcccctttatcattttttattgtgtctatttgattcttctctcttttcttctttattagtctttctagtggtctatcaattttgttgatcttttccaaaaaccagctcctggattccattgattttttgaagggttttttgtgtctctacctcctttagttctgctctgatcttagttatttcttgccttctgctagcttttgaatgtgtttgctgttgcttctctagttcttttaattgtgatgtcaggttgtcagttttagatctttcctgctttctcttgtgggcatttagtgctataaatttccctctacatactgctttaaatgtgtcccagagattctggtatgttgtgtctgttctcattggtttcaaagaacatctttatttctgccttcatttcattatgtacccagtagtcattcaggagcaggttattcaatttccatgtagttttgtggttttgagtgagtttcttaatcctgagttctaatttgattgcactatggtctgagagacagcttgttataatttctgttcttttacatttgctgaggagtgctttacttccaactatgtggtcaattttggaataagtgtgatgtggtgctgagaagaatgtatattctgttgatttggggtggagagttctgtagatgtctattaggtccacttggtgcagagctgagttcaagtcctggatatcctttttaactttctgtcttattgatctgtctaatgttgacagtggagtgttaaagtctcccattattattgtgtgggagtctaagtctctttgtaggtctctaagggcttgctttatgaatctgggtgctcctgtattgggtgcctatatatttagtttagttagctcttcttgttgaattgatccttttaccattatgtaatggccttcttcgtctcttttatctcttttgatctttgttggtttaaagtctgttttatcagagactaggattgcaacccctgcttttttttgttttccatttgcttggtagatcttcctccatccctttattttgagcctatgtgtgtctctgcacgtgagatggttctcctgaatgcagcacactgatgggtctcgactctatccaattatccagtctgtgtcttttaattggaggatttagcccatttacatttaaggttaatattgttatgtgtgaatttgatcctgtcattatgatgttagttggttattttgctcattagttgatgcagtttcttcctagcgtcaatggtctttacaatttggcatgtttttgcagtggctgataccagttgctcctagtgcttccttcaagagcttttgtaaggcagacctgatggtgacaaaatctctcagcatttgcttgtttgtaaaggattttatttctccttcacttatgaagcttagttaggctggatatgaaattctgggttgaaaattcttttctctaagaatgttgaatattggcccccactctcttctggcttgtagagtttctgctgagagatccgctgttagtccgatgggcttccctttgtgggtaacccgacctttctctctggctgcccttaacattttttccttcatttcaactttggtgtatatgacaattatgtgtcttgtagttgctcttctcgaggagtatctttgtggcattttgtgtatttcctgaatttgaatgttggcctgccttgctatggtggggaagttctcctggataatatcctgaggagtgttttccaacttggttctgtcactttcgggtacaccaatcagacatagatttggtcttttcaaatagtcccatatttcttggaggctttgttcatttctttttacttgcttttctctaaatttctcttcctgcttcattttattcatttgatcttcaatcactgatactctttcttccacttgatcgaattggctactgaagcttgttcatgtgtcacgtagtttttgtgccatggttttcagctccatcaggtcatttaaggtcttctctatgctgtttattctagttagccatccatctaatcttttttcaaggtttttagcttctttgtgatgggtttgaacatcctcctttagctgggagaagtttgttattactgatcttctgaggcctacttctttcaactcgtcaaagtcattcttcatccagctttgtcccattgctggtgaggagctgcattcctttggaggagaagaggcactctgagttttgaaattttcagcttttctgctccggtttctccccatctttgtggttttatctacctttggtctttgattgtggtgacctagagatggggttgttgtgtggatgtcctttatgtttgttagttttccttctaacagtcaggaccctcagctgcaggtcttttggagtttcctggaggtgcactccagaccctgtttgcctgggtatcaccagtgaaggctgcagaacagcaaatattgcagaacagcaaatgctgcctgatccttcctctggaatcttcatctcagaggggcacccagctgtatgaggtgtcagtcggcccctactgggaggtgtctcccagttaggttactcgggggtcaaagacccacttgaggaggcagtctgtctgttctcagatctcaaactccatgctgggagaaccactactctcttcaaagctgtcagacagagacgtttaagtctgcagatgtctctgctacctttgttcagctatgctgtgcccccagaggtggagcctacagagtctggcaggcctccttgagctacagtgggttccactgaatttgagcttccaggctgctttgtttacctactcaagcctcagtaatggcggacgcccctcccccagccttgctgccgccttgcagtttgatctcggactgctgtgctagcagtgagcaaggctccatgggtatgggaccctccgagccatgcatgggatataatgtcctggtgtgccgtttgctaagacagttggaaaagtgcagtattagggtgggagtgtcccaattttccaggtgctgccccagtgagatgaacccagtacctcagttggaaatgcagaaatcacccatcttctgcattgctcacactgggagctacagactggagctgttcctattcgaccatcttggaaccagatcccaggagtagctattcttatatcagactaaacaaactttaaagcagcagcagttaaaaaagataaagagggacattatatagttataaaaggactagttcaacaggataataatcacaattctaaatatatatgaacctaacactggagatcccaaatttataaaacaattactactcaacctaagaaatgagatagatgacaacacaataatagtgggggactttaatactccagtgacagcactagacaggtcatcaagacagaaagtcaacaacaacaaaaaatggacttaaactataccttagagaaaatgggcttaacagatatttatagaagattctatccaacaactgcagaatatacattctattcatcagcacatggaacattctccaagatagaccacaaaacaagtctcaataaatttaagaaaatcaaaattgtatcaagtagtctgtcagaccacagtagaataaattggatatcaactccaaaaggagcccccaaaaccattcaaatagatggaaattaaataacctgcccctgattgatcattgggtcaacaaagaaatcaagataaaaatttaaaaaatgtttgaactgaaccataatagtgacacaacctataaaacctctgggatacagcaaaaatggtgctaagaggaaagttcatagcattaaatgcctacatcaaaaagtccaaaagagcacaaatagacaatctaaggtcacacctcacagaactggagaaacaagaacaatccaaacccaaactcagcagaagaaaagaaataaccaagatcagagcggaactaaatgaaattgaaacaacaaaaacaatacaaaagataaatgaaacaaaaaactgtttctttgaaagataaataaaattgatagattattagcaagattaaccaataaaagaagagagaaggtccaaataagctcaattagaaacaaaacgggagatattagaactgataccacagaaaaacaaaagtttatgcaaggctaccatgaacacctttacatgcataaactggaaaacctaaaggagatggataaattcctggaaatatacagccctcctcgattaaaacgggaagacatagaaactctgagcagaccaataacaatcagcgacattgaaatggtaataaaaaaattgctaacaaaaaaaatccatggtcagacggattcacagctgaattctatcagacattcaaagaagaattggctccaatcctgttgacactattccaaaagttagagaaagagggaaccctccctaaatcattctatgaagccagttaacatcctaataccaaaaccagaaaaggacataacaaaaaaagaaatctacagaccaatatccctgatgaacatagatacaaaaacactcaacaaaataatagctaactgaatccaacagcatatcaaaaagataatttagcatgattaagtgggtttcatatccaggatgcagagatggtttaacatccagaagtcaataatgtaatataccacataaacagaattaaaaacaaaaatcacatgattatctcaatggacacagaaaaaaacatttgacaaaatccagcatccctgtataattaaaactctcagcaaaatcggcatagaagggactcaccttaaggaaataaaagccatctatgactaacccacagccaacataataccgaatggagaaaagttgaaagcatttcccctgagaactggaacaagacaaggatgctcactctcaccacttctattcaacatagtactggaagtcctagccagagcaatcagacaagagaaagaaataaagggcatccaaattggtaaagaggaagtcaaactgtcactgtttgctgatgatacgatcatatacctagaaaaatctaaagattcccccaaaactcccagaactgataaataaattcagcaaagtttcaagatacaaaattaatgtacacaaattagtagctctgctatatgccaacagcgaccaaactgataatcaaatcaagaactcaacccattttacaatagttgcaaaaaaattacttaggaatatatctaaccaaggacatgaaagacctccacaaggaaaactcaaaacactgctgaaggaaatcatagatgacacaatcaaatggaaacacatcccatgctcatggatgagtacaaccaatattgtgaaaatgaccatactgccaaaaacaatctacaaattcaatgcaattatcatcaaaataccaccatcattcttcgcagaaagaaaaaaacagtcctaaaattcatatggaaccaaaacagagcctgcataaccaaatcaagactaagcaaaaataagcaaatctggaggtattgcattaccagacttcaaactatactacaagtccatagtcaccaaaacatcatggtactggtataaaaataggcacacagaccaatggaacagaatagagaactcagaagtaaacccaaatattacagccaactgatctttgactaagcaagcaaaaacataaagtggggaaaggacaccctattcagcaaatggtgctgggataattggcaagccacgtgtagaagagtaaaactggatcctcatctctcaccttttacaaaaatcaactcaagatggatcagagacttaaatgtaggacctgaacccataaaaactctagaagataacatcggaaaaaccctccttgacgttggcttaggcaaagaattcgtgaccaagaacccaaaagcaaatgcaacaaaacaaagataaattgacggaatttaactaaactaaaaagcttctgcacagcaaaagaaataatcggcaaagttggcagagttcacagacaacccacagagtgggagaaaatcttcacaatctacacatccaacaaaggactaatatccagaatctacaaggaactcaaacaaatcagcaagaaaaagacaaacaatcccatcaaaaagtgggctaaggacatgattggacaattctcaaaggaaggtatacaaatggccaacaagcatatggaaaaatgctcaatatcactaattatcagaaaactgcaaatcaaaaccacaatgcaatgccacctccctcctgcaagaatggccattacaaaaaaatccaaaaataatagatgttgtcatatacgcggtgaaaagggaatacttttacaccattggtggaaatgtaaactagtacaaacactatgggaaacagtgtggagtttccttaaagagctaaaagtacatctaccgtttgatccagcaatcccactactaagtatctaccccaggaaaagaaatcattttacgaaaaaatacttgcacatgcatgtttatagcagcacaatttgcaatttcaaaaatatggaaccagcacaaatgaccatcaaccaacaagtggataaagaaaatgttatatatatacaccatggcatactactcagccatcagaaggaaggaaataatggcatttgtagcaacctggatggaattggagactattattctaagtgaagtaactcaggaatggaaagccaatcattgaacgttctcactcatatgtgggagataagctatgaggacacaaaggcaaaagaatgatatattggactttggggactttggggaaagggcaggaggtgggtgagggataaaagactacacgttgggtacagtgcttgggtgatgggtgcaccacaatctcagaaatcacccctaaataacttattcatgtaaccaaacaccacctgctctctcaaaacccactgaaattaaaaataaattaaaaaaaacagacaagtaagacaaaaagatcaaaaactctatgttttgaacacagactgttccagcctgactttgcttttagaaattgccttgtttctcttcaacagaccgtactttttagtgtgcacaataaacaagtgctcaggccgagatgcaagggaaagggatcctaagagttggcaaacaatacatggacaggcacgttgttaaaaaaaacaaggaagctgagcctgtgctcacggacccaggaataccaagcagtgactgtgccgagttccacaggcagacaatggggcttcttagctttcattcctggcagttccacttggggagagggatgtagctcctcctggcagtcaggatgtgacaagaataatgtgccccacgttcttgaggaaatattttaagaacgtgtctgtagtttgtcttttggggtttcttagcaagtaatcagaaagtcagcatgctgatagtttaaggctagttgattttttttttcatgactgtgtaaatggtacaatttttttaaaaaatgtggaggtttaaagtaccagttttatttaatggaaaagctggatggaagaaagatgtgtggattaaatgccaaaacacagcttccttgtcttttcttctacaaattgagttaattcatttagccactcagagtttaaaaatagccagtggaaacttagctgggcctgcttgagagggaggaaggcagggagccactgccactggtcaagggcaggtagggaagtttgcaggaggtcatagactaccttggctttgagtgtctctaaatggagaatgggatgggagtcaagcccctaaacacatacattaaggaagtacatgatttgtagctgtggtgaaacagataattgaattgggcagagtttccagctgccttgtaagctcggtctggcctgaccatgtgaccctgatgaataatacattggcagaacaatgagatctattgacatatccaagctagttttgagttctgctaaaagcaaaatcaaactatttctattgtagtactgatttacagaagaaatgcaaatatatttaaaacaggttttacaaaactatttaacatacagacctcttttaagggaaatagtttatggatttccaccactgagttaaatttcttttactataatgatagtctctcttttatttttttttcttgtacttattgagtaatgagccctcaattgaggagattcttggatcttgagtttctagaattcggaaaagtgttacccattattgcttcaaatatttttctgcccccatcccaccctggttaatctagtaacacatataattagcttgcttgaagttgttccatggctcactgatactctgtttctttttatttttgagttttttctcttttttaggtatcattgtcctgcacagtctgatgtcctatgtgtcttatattttttcctgctttccagttacctccaacaggtggataaaattggtccctgttaattcatcctagctggaagtggaaccaacaacagccacttccaaaacctctctcaaaagattaaggaagctttcttattccaaaaaccctctggaaatgtcttcttcaggttcattgacgatttaaggtcatgcatttaccctaaatctataattcttgcaagatgggactgtgatttttaagcaggcttgaactacctgtgccactgctagagttagaggtagagttagctgttctctaagtcggcttctcaccttgagcaatagtgacattgtgggctggataaatctttggtgtgaggggccgtcctgtgcactgtagtatatttagcagcattcctgtcctctatttatgagttgccagaagttgcctttccatattgtgacaactaaaaatgtctccagacattgccaaacatcctgggtgtaggggcaaaatagctcgcaggggagaccccctgttctaagtatgtaggcttcatgaagaggtgtgaataccaaataaatatggagttgttaccaagagaaggggaggcaaccacagtatccattgcaatatacaagcatcatattttatggcaaaagacatttataaattattttggtatatatttggagtaacgtataatccttaggtactaataacaagcaagttacggatagctaagagaatcaaattaggtacatatacaaaggcacaatgtgaagtataaaaccttaaacacttagaggtacaaaaagtgaaaaccctaaacacatactatgtatgtgtacctaagttgatctaatttgtacaccgttacatgtttcatgttatgattagggtagatggtagtgaagagaacacctgataaatttaggacctaaagaacatttaggggaacttcatcattttgtaataagcatcaccctgtgtttaaacagcatacgagcattcttccaggtgtagctacaggtacctggaaggaatattgggaacagataaacagtgaccattttgcctgagaccctgagaagactgcccatctgatctctctctgatattagactcactagggatagataaagaatgaaatactggctgttttctaaaatgcaattgctgaagcctttaaaattcaatgggggtatcattaggatttatctattcttttaaaactattaccttttaatgaaactattacatgtagagcacttagtttacaaaaggattttcaaatcattatcctgtttaacgtgcaaagtccttgtgacttggttaatattaatattattttccttttagacttgtggaaattgagtgtcaaaggctttaagaaacttacccaaggtcacacagaaggtaaatgaaagagctggagtttgataccagatctgaaccctgtcattccaggttgcattttttccctcttcaatctacttttttaagctgatagaccacgatgcattctttctaaattaagaagtggggaaatttgctgtttgcaaaattactagctctgagtctatagatgctccaatgcaaccttcagggtcaagcactttggcagtgccaaatagtttgtttctgactagtgtagacaagcatttagacagcacataactagctttgtgagcgttgcttacacaaaacacctgccaccaaccctctctggccatcagtgtcctgtctcagagaagcacaacttctttgtcatagaccctgggcaatttttaaccacaggaaaaagctttgctacttcaaggctggtcctaagactagcagtgttgatatcacctttgttagaaatgaagaatttcaggccatagcacaaacctacttaatcagaatctccattaacaagctccctgtgtgattcatatacacattaatgtttgagaaacactgtgttagatacaggtaccctaggtgacttctcaaagtcctctccagtctagtggttctttgacccaatggcaaatgatctgggcaattttgataattctgatggggtgtgcctaatcacattagtgatgttatggcttttgctaaggctgttatagatgatatcaacacacaagatctgccttaacacaccatgaaatcatgcaaggtatttgtctctgaagatcccaggggcataagtgcattagacaggcacaggctggacatgaataccacccaggagcatggctcctagtgccagatgcattatgcttatgctatccacagtgattaaatcaggtggctataaattgtgatgtcttaatgagtgatactttcagatcttcacagataacttgttttattctgtaacctctaaggaacgtagatattatctcatagactgatgataatgatgggtccaaaatttgattttcaactttgtcacctactagttactaagtacaaaaaaatctgatttttctaggcctcattttctgtaaattgaaaagattagactgataatctaatctaatcttgttgtaatccattaaaacaaacacacctgtggccagacagagttagagtgataatctatttttacaacagctataaagcatgatcgcatgtacactgtgtatcattttatgataattaaccaattagaccataaaaatggtgaacctaaactgacagggacttggaaaggaatttgaaagattgctaagaatactcttccaggataatttaagtgataaccacaaactgaaagatggaggccaccatgacctgctgagacagcttgtgactgaaaactgttgtttgagcttgactcatgtgctcaaagttcagatccttaaagggacacttcccctaaagaaacagaaaacaacataacatttaattttgcttctggaggaggccagggcctacctagacaaaactgagctttgctagttcagcttctttatttaatgaaggttcagtaattatggcatgtattatcaagcaaaatctttctattgaaagcaccagaacttattctttcaaaacaatatttaattgtggaatatataaaaaaatacagaaagtaataactagatacccatatctattaaattaataaatactaacattttgtgatatttcctttagattcttcattttttctctatagaaattaattatacctacagttgaagtcacactcattcttacatccaccccaaaactatgattttgaagtagtttgtattattcccttgaatatttttgacacttttacacatatttatgtatcttaaataatgcatacaatcattttgttttaatttttcaaggatgcaatttgtagcagatgctaaattccctcaagccactggattttagggaacctgtaggggacagttgcatgaatgctgccaggtccccttcaagcaattttcagtgaatctctgctcttctacatcagggttttccctgaagacctggaagttccttggctgcacaggcacagactacaactgtggaggagtaataccaggagcaaccctgaactaatgagcagcagagtcaagggataaattttccaggctcttgttctcttcatgaaaagttatgaggcacagtccatactattccttggagatcccaaagcaggatagtatcacagttgctcaaagaggtaacaaacacaataaaacatcctgtatttgccttgcttccttccttgcctcactctgtttgcccctttgctctgtttcctgggataacttcccaaataaaccaccaagtccatatctcattactgaattctctaattagttcaaatactttggttacaaatcattgaattttactgcagtgtgtccaaaaatgtggtatgattgttactgatgctttctgtttattgagactggttttgtgacctagcacatgactaacttttgctaaatgtttcatgtttgtttgagaaggagtattctctaattattgagtgcagacttctatatatgtctacaaatcaagtttgttaaattttttggttaaaatcttctattaggtttttgtcttcttgatacatttctgaaagaaatgtgtagttgtagatttatcattgtttccttttcagtctgtcagttttgatttttatattttgaggctatgttgttaagttcatacagcttcagggtgggtatatctttgtctcaaacaatacattttctcctaatgtattttgtcttctactaatatagtttactcagtactttttctgttctaacttttctcatccactttctctcaaactttctggtgtagttatgatttaatgtgtctcttgtgattgtcaatccagaaaaatgatgagacaagtctcaagcattttagcaggtttgtttgccaaagttagggatgcatgcctgggagacaggtctatatgcctttctctgaagaaaggggaaaggccgtgatattgagaagtacacaatttttatgtaagaggaggtagggaaaaatagttattcatgcctttggctcaatgaatcttcattttttttttttttacataaaatgacatgaacaaatggggcagaggaaaaatgcagggataacatagacaaaatggggcaggagaacaatcagatatgcatttgtgtctggtggactaggagtgactgcacctataaagataagctatcaatttacattgccatggtggaattttaacagaaacaccttaaaagatcttgcagctcactaggaatttccttgtggacaaaatatggggaggtgtgtagattttcatcttgtagtcatcttatttaggaaccaaaatggtgaggcaggttttcgtgacccagttcctagcttgacttttccctttggctaaatgagtttggggtctcaaaatttaatttcctttcacatgatcaacacacagttggattttttttgtcagttttatgaattactgtatgtttcactaggaattttgatgaatttatatttattacagttatatttctattgcttacattctgttgtgtttctatttggcaggcattttttcctctctgtgtctttttttctccttaatattataggggtcagcaaactattttatataaataaagtttttatttttctccttaatattataggggttgtcaccaaactattttatataaataaagttttgttggaacatagccacactcattcaattatatatagcacatagctgctttcatactacaatgctagagctgtatatttgcaacagaaattatatggtctgtagtgactaaaatatttactattaggacatttcagaaaaaaattgtcaactcctgttgtactggattcaagcatttcttgtctcttttcctttgaaattaagagattgtaattttattcctataatagttacctttacattaaaaaaagaaatcaggatctttttatccaaaaacaatttgtcttgatggagggcatctggctgttttggggatactattcctgaccttcttttgactaaaaaagcttcctgcctgccataccagcaaaaaatcaccacgtactccccgtctctactaaaagcacaaaaattagccaggcatggtgacatgtgcctgtaatcccagctactcaggaggctgaggcaggagaattgcttgaacccgggaggtggaggttgcagtgagccacgatcacaccactgcactccagtctgggtgacagagcaagactctgtctcaaaaaaaaaaaaagaaaaaatcaccatgtaccaatctgtccaagcttatccatggatgggactaccgggaaaacaggagttctgatgcttgtcttgctctgaatgtctgcttgtcacctgcttaaggttatcgactgtgattccgtgaatcattgttgtacatgacccctgtgactctgtagtttctctactggattaacaatgatagccataggggttttgttttgttttgttttttccttactggagtgacagccctgtataaagttacaaagttacagtcgatgagaacttgcagaaaaccacaagaccaagactaggagtgatttgaaggagtggaagtccccgaggcactatagaaccttccatgactcagttactaatcgcaagcacctcgctgtagctgtacattgaaccttgatatcttcaggtctttggaacttttaagtctcctgaggattttttttttaatacaaataaaatctggcttaaaaaaaaaaagaaaaggaaacaggccaggtgtagtgtctcatgcctatattcccagcacttttggaggccaaggtaggaggatcacttgaggccaggaatttgagaccagcctatgcaacatagcaagactccacctctacaaaaaaaaaaaaagtaaaaaagcatacccgtaaaaagccaaaagttaatatatctacatttttgtgaacaaaacaatgaactttagaactctttagttctaatcaccttctccactttccatttttgtttaatattttagtttcatctcattaaaattcttctatctagtagtcattattattattgtttttcaatagccaatttttatttactcaaatatttaccacattatttgatacatactgcttttttatacccaactcttttcttttcagttgaatttcctctttctaaagtacttcctttatataatagttctttcaagaaccatttgaaaatccttactgctcattgcatatggcatacacattcagatttattttattttattttatctcacccttgaatgataatttagctgatatttttcctcaatactctggagatattattatattattttgggatctctattttttttctattgagaagtcagctttagtctaacagtcactttgtaagtaatctatattttcattctaactgctgttaagtttttttcattatttacggtgttttacagttttattctgatgtgtctaggtgtgaattaatttttgtttagcttagtggtcaatgctgccaggtccccttcaagcaattttcagtgaatctctgctcttctacatgaaattcttatatttgagaattaagaaatgaaattcttatatttgagaattaaattctttcactgattctgaaaaattctcatcaaatattacctcttccccaattaatctatttcttcctttgtaacttttctagatatatattgtctgatatcctctatctcaatagttaatttcataggattcatggacattaattctatccaacacaaactcccacaaatttcttcctcagcatcctgcaaatgtttcaatatatgcaactctacttatttcttttcttttttaaattaaaataaaaatttgtagagacagagtctcactctgttgcctcagctggactgaaacttctaggctcaagggattctcctgcctcagcctcctaagtagtttgggactacaggcacataccacatctcttcttatttctttacttcggtttcacataggcattaagacacaggttttggtatgacacttatgtttacatttgtgttttatttgtactatatattcccaacctcagttttagattcaacagatgctaaatggagaaaaaaaagagtatataccacttaaggttgctgtgaggacaaaataagataacatacataacacttagttgggtgtgtggcatagtaagcactcaatataatggaataatgaaaacagttattatcatctactcaagataaattttcacacctatgttcactgtccatctcctctgtaattttcaatgtttactttttcctctagtattttcagcttctttccctctactggatcctacctcataggctataaaaatattctctttgtccaaaataaaaatttctgtctctaccctgaggtttcccttcagtttccacactttaaaaaaaaatcttcctccatggctcacacctgtaatcccagcactttgggaggccgaggagggtggatcatgaggtcaagagatcgagaccatcctggccaacatggtgaaaccccatctctactaaaaatacaaaaaattagctgggcgtggcggcgcgtgcctgtagtctcagctactcgggcggctgaggcaggagaatcgcttgaacccaggaggcagaggccgcagtgcagtggcgcactgcaacttggtgataaagcgagactctgtctcaaaaaaaaaaaaaaaaaatctccctttctcagccatattcttttattgtagtaaaataaaataaaatttaccatgtaaccaattttaagtgtacagttcagtagtattaaacaaattcataatgctgtttatccatcatctccatccatctccataacttttttcatcttgtaaaacagaaactctatacctattaaacagtaactcttcattccccttcccactagctcatggtaaccactatgctactttctgtctctgtgaatttgactactctaagtgcctcaggtaagtggaatcatacagtatttgtttttatatgactggcttatttcatttagcataatattcttaagattcattcatgttgtagtatatgtcagaattcctatctttttaagcctaacgatattccattgtatatgtatactacactttgcttatctacccacccaccgatgaacatttgggttggatccatgttttagctattgtgaataatcctgctatgaccatgagtgtacaaatacctcactgagactttgctttcaattattttgggcatatacacagaagtgaaattgcaagatcatatggtaattctatttttaactttttgagcaccaaccatactgttttctacaggcagctgcaacatcttacattacattttacagtgcacaggggttccaacttctccacatccttgccaacacttgttattttctgttttgttttgtttatgatggccatcctagtggatgtgaggtagttcaacataagtttttatttcgcttgggtaaatacctaggagtgggattgccggactatatggtacatctatatttaaatttatattaaattgttgagccatttttcaaaatgaatgtacctttttacattctgtctagtgatattgagagttttagttgctctatagctttgttagcactagacatcctcctacaaaattttagccattctagtaagaaaatggtagtatcttattgtggttttaatttttactttcctaataacgaatgattttgaacttcttttcatgtgcttatatgccatttgtatttgtatctcttctcagtcacatgttcaaatcttttgcccatttaaaattcggttgtttttactattttttgatttcttaatatttagatacaagtcctttatcagatatctttttttgcattttcttttggtagtttgtcactttgtcttttaattctctttatagcgatttttgaagagcaaaaatttttgtggatttcatgtctaaaagtctttgtctaagccaaggtcacaaagattttctcctgtgttttattccagaagtgtaatagttttagatccatgatccatcttgagttgatttttgtgtatgctgtgaaataaagttgaggcttttttgtttttgttttttgcatatagatgtccagtttttctagcacataggatgtgttcaataacattaatacaatattcattatacagtagtatgatattcattgtacaaagagaagaaatagaagaatcagctggaccccaaagctgtcttggctttctaatatgcctcaggggcaaaaatgttctagtttaactactttcaagcacaaatgcctagttagaaaatattaattggactagctctatctctgctgatctctctcatgcttgagtttttatgacattgaaagatttattatacgatctagtgcttattgttttaaatattttcctgtatattattatttctgcatttcactttctgttttcctgtgcattattaatatatttctacatttcattaaatgctctgagagcttcttgatttgtgactctaataatggttagctaagttcctctccattggttactgatagattaactgacgcctgacttctgagtaaagcagttgctgtacaggtaacatttactttcttctatttatttatttttttttgagacagagtctcactctgtcgcccaggctggagtgcagtggcgtgatctctgctcactgcaagctccgccccctgggttcacgccattctcctgcctcagcctcccgagaagctgggactacaggcgcccaccactatgcccggctaaattttttttttttttttttttttttttgtatatttagtggagacggggtttcaccgtgttagctaggatggtcttgatctcctgacctcgcgatccacccgcctcggcctcccaaagtgctgggattacaggcatgagccaccgcgcccggcaacatttaccttctttgagttgaacactgtcatgtgatacagttttaaaagtaaaccagtgagtgaaggttatattctcttttagatataactatgacaaacaacacatcgtgctgacttgttcttagactgaaaagtacaaattttgagcacagcttcctgttctttagaaacatgtaattttagtcagcaaacattagcaaattggagagttttgaattatttatttattgcacaatcacaaatttacagccttgtgaatgttaatattttctgggaatgagaacagacaaaaagataaaaagctttagagatagtccttagttacccatagttttgaagcctaaattcaattgcacaggaaaaacaaaaaaacaaaaaaaacaaaacaagataaagaactagagtagtaattagcctgaaagtcagaagatcagagttctttagttctggctctggttctagtcaactgtgagatttttgagtaagtctaaaatcttgctgggtctccaaatcctcatatttaaaaccagagccttgaatttttttttttttttttgagacacagtttcacttatagcccaggctggagtgcaatggggcgatctgggctcactgcaacctccaccttcagggctcaagcgattctcctgcctcagcctccagagtagccgggattataggcgcctgccaccacgcttggctaatttttgtatttttagtagagacagggtttcactatgttggccaggttggtcttgaactccttacctcaggtgatccgcctgccttggcctcccaaagtgctgggattacaggggtgagccaccatgcctggcctcagaggcttgaattctgatgattggtaatgcctcttcctgttttcagattctactatttatttaaatcaacaacaactgtggtagaaagaatatgtaatgataatggaaagtgttagcagtagaaaaatgagctgtagaatggagaggaataaaggaatgattttttttttttcgggaaggagaatttctccctgaatgaatgatcttttgatagaggaaggcttaatgctttaacctgaaagctggcatttcacataatctgaactgaatagttttgtgatcatttcactgtttaaaaagatgttgaagttcatagatatgtccatctaaacattgagtgagaccaagatataaatggatgagttacatagaactaagatttttttttaaatagaaataggatatcatgaagaacattctatgctcatgggtaggaagaatcaatattgtgaaaatggccatactgcccaaggtaatttatagattcaatgccatccccatcaagctaccaatgactttcttcacagaattggaaaaaactactttaaagtacatatggaatgaaaaaagagcttgcattgccaagtcaatcctaagccaaaagaacaaagctggaggcatcacactacctgacttcaaactatactacaagcctacagcaaccaaaacagcatggtactggtaccaaaacagagatatagaccaatggaacagaacagagccctcagaaataatgccgcatatctacaactatctgatctttgacaaacctgacaaaaacaagaaatggggaaaggattccctgtttaataaatggtgctgggaaaattggctagccatatgtagaaagctaaaactggatcccttccttacacgttatacaaaaattaattcaagatggattaaagacttaaatgttagacctaaaactgtaaaaaccctagaagaaaacctaggcattaccattcaggacataggcatgggcaaggacttcatgtctaaaacaccaaaagcaatggcaacaaaagccaaaattaacaaatgggatctaattaaactaaagagcttctgcacagcaaaagaaactaccctcagagtgaacaggcaacctacagaatgggagaaaatttttgcaatgtacccatctgacaaagggctaatatccagaatctacaaagaacttaaacaagtttacaagaaaaaatcaaacaaccccatcaaaaagtgggcgaagtatatgaacagacacttctcaaaagaagacatttatgcagccaaaaaacacatgaagaaatgctcatcatcactggccatcagagaaatgcaaatcaaaaccacaatgagataccatctcacaccagttagaatggcaatcagtaaaaagtcaggaaacaacaggtgctggagaggttgtggagaaataggaacacttttacactgttggtgggactgtaaactagttcaaccattgtggaagtcagtgtggcgattcctcagtgatctagaactagaaatactatttgacccagccatcccattactggatatatacccaaaggattataaaacatgctgctataaaaacacatgcacatgtatgtttactgtggcactattcataatagcaaagacttggaaccaagccaaatgtccaacaatgatagactggattaagaaaatgtggcacatatacaccatggaatactatgcagccataaaaaaggatgagttcatgtcctttgtagggacatggatgaagctggaaaccatcattctgagcaaactctcgcaaggacagaaaaccaaacaccgcatgttctcactcatcggtgggaattgaacaatgagatcacatggacacaggaaggggaacatcacatactggggcctgttgttgggtggagggaggggggaaggacagcattaggagatatacctaatgttaaatgacgataatgggtgcagcacaccaacatggcacatgtatacatatgtaacaaacctgcactttgtgcacatgtaccctaaaacttaaagtagaataataaaaaaagaataaaatttacgtcttttatattaaaaaaaaagaaataggatttcactttgttgcccagactggtctcaaactcgtggccctcaagtgattctcctgcctcagtcctccaaagtgttagggttacaaatgtgaagcactgtgcctggtgtaaaactagaaattcttgcaccattctcaattatttgccttttattctggatccacagggactaaatctctatgatctccatgaccaaaacttgtcaataatttctgcaaagttattaattaaccaattcagctaaaagtccaattagtgtggaagacagcatgttgctaaaaatgatggttgtggctttgtgaagcccattctgggtggcaagctcatattcctttttctcttctttgagggtgacagtggttgctctgtcccagcctgtgtcatgggtggtcctggctcactatcaggtgatgagtggatatgttagcgctttccattcgaagggttaaaaactcactctggctgagtaattgaggtttgtagaaaggagaaaattattgagatttatagagaggacagaagtggctctaagaaacagaaaattcatggagaacaaggagtaagtggggtgataggtttcagggaataaagagaaacagtatttgggacacaagaatgacagagctcaaaaaactaagttatcttattgaattctcaccactggaatttgttctcttcactagagcagtgtcatcaatgcgactcaaccattctctcaatttttgcttctctcctctgtgtctggtcacttatttcaaaatcaactgcctgaggctctttgtgtttttcaagtcaaattcccgagagagaatttattagtctagctgatattcattatctctgttttgggccatgggcagaatgtcaacatagcaggcctaaggctgctatttttagtagggtctgcttgcaaggttggcccttagcacaataatttccacagataattatttggaataaattccaaatgataaagaagtttcactgtgcctagattgtttgtgaaaatgtgatttatgctgaacacctgctttccttctgccagtctggaattttggcatgtgttatgcagagagtagatgtgatgagcccccaataaaaatgttgaacgctgagtctctagtgggatttcctgggcagaaacattgcatacatgatacagcatttttaattgctgaaggaagtaagtcactcacatcatgtctccctttacagaaggagagagcataggaagcccgtgcatggatttctgtaaattctgtgtcttttcccattatgatctcactgtgtattcttgttatttcatctgtgtaataaatcctagctatgtggtgatttcctgagtcccatgagtccttctagcaaatctctgaatatggggatgatcttgaagatcctgacacaggccatttcaattaattaacaagattaattgcatatagtggagagcagctagagaccccagcttatggaatgatctagagcagtggctctcaactctggctgcaaagcagaatcttctataatgcctttataaattgaaccccctccaagattaattagaatcctggaattagaatctgcgggtaggttctggacatgacaagttgttttttttttttttttttttttgagacagagtctcgctctgtcacccaggctggagtgcagtggtgtgatctcagctcactgcaacctccgcctcccaggttcaagcaattctcctgcctcagcctccagagtagctgggactacaggtgtgtgccaccatgaccagctaattttttttctgtatttttagtagcgatggggtttgaccatgttagccaggatggcctcaatctcctgacctcatgatccgcctgtctcggcctcccaacatgctggcattacaggtgtgagccatcacgcctggcctggacagttacaagtttttaaaattctccagtgattcttatgtgcagtcataattaggaccaatggtctgctgcaattctcctccacagggttctagctggcagttttctttagaaaactgtaggctagggaggcttgggaggcatcattatctatctggcagtacaatgttcatttttcagacaaagaaatgaagaacccatgttttcaggcatactgacaaaaaatgagtgaaactgtttagttgtaaacaatagtctgggaattgtgttattttaggggtcctactgcagccatctttatagcataaagtttatgctgacaatgttccatgctttcaaactctggtagaaaaaccagcagaaaagaataatattctttgcccactttttgatgcggttgtttgtttggaacatcacacaccggggactgttgtggggtgggggaggggggagggatagcattaggagatatacctaatgctaaatgacgagttaatgggtgcagcacaccaacatggcacatgtatacatatgtaacaagcctgcacgttgtgcacatgtaccttaaaacttaaagtataataataataataaaatttaaaaagttacatcttcttgagtaaaaatataaaattaaaaaaagaatattaaaataaatacaaccaactgcagcaatattttgccattgacccaccttcttgaacatattgttccatgaaatatatctgttatgaaataaagtcacatctgactcttagggttattcaaagatccatgttaaattcttctcatcggagacaatctaattttgtcttttttgaaaaagctagctggcaggaaagccctactggctcagcctgtggtatcacttgctcctttttcaatgtagacatatgtggcaattgaccatttgggtatgagatgtggctctctcctccagtcttcctatcactggcttcctcacagccttccaggccaaagtcctctgatacagctgctgcaaaaaagagctgccaccttctcagagcagcctccatttggcagagctaccttcatgccaggtcttgcccatcctggacacctgacaaagatacgttgatttgatttgatgtgataatggaagcactggaagaaagaactactgttgacaggcaggagctcaccacacttcctgtcttgtgtctttctatagggcccaaggctgctccataaagtgcctctggataaaagcaggtgtttttttatatggagacagccttatcctgcatgtacaaaagtgatatcttgatgccctgctaggatgcagtttttcctcatgatagccacacggtgtttgtaagcgacattgactatctatcacaacaccccttcccctgcacagcttcgactggcccttgcacagttggaggtaaaccaagacttaactgagctggcttaaagcttcagcctccagctttccttttatttgtttcaccctttggagctggtgtctctcttacacacatgggctgagtgttctctcaagctgtttccttcccccccatgacacccactttgaaaaagaactagaaactcattcatcctaaaaaattcaggttgaaattctcttgtgagtttatgccttttaggaaagctcaatgaacaaaacttcaggtggaggaggttgctttttggtggcagtggtggtgtaggaggcatggaagaggtggcttcctggtacacttggtaccctgactgcagttacctcttatcagcgcattccaccccatggcagcctgccactggctcagacccgtgggcttggcatatagatgacccttagaacggttactaaaagtaccagagggataaacttcaattctgcccccaccattttgtggtctccaaagcatttcatttcgcaattccattttgtttccctttccacaagttaaccaacgcatctggcagctgtgatgcagagtcagcaagaactgttgtttttcctttactgcctggcaatgtctcaaatttgagtgagttctcaaccccaattatgcttttagaaattttcctaaacgaaaggagattgctaacagaacaagaatcttaaaactgcatgaaattctacactgagagtcttgaagaaaggctgttcaaacaaaaactccatgagaccaggagaggacattcttatgtgtaggtaacttttatacccagaaagataatgtaacaaataactagtaatagctatataaaatatgaaaaaaagcagattgcaaaaataacatgcagaaagaccctcttttggtaaaatgcaggacatacaaataatacagaccacttattgtttgcttactaggtgccaggcactttattaagtgccttgtatatagcactttaatataaatcattaacaaaaacctgaacggttcatattatcctcattttactgatgacaaaactgaggtgtacggaagttaacaatatgcccaaagtcacattgacaatatgtaaaaaatatccatgatgcgttaggatattttgaaccattagtgtatgtgtttgtaaagaaaaaccactggcaataaactgtaatattaaccgattaaggataatgactttttaatttttaaatttagattatgtatatttcaaaatgcatctccaatgaatgtctttttttaacagaagttttttttaagtgagaaaattatgtgaaactgtttatagatgagttaaatacatttactgttggatggtaacaagtttcagtgaattattttttttctatttattctgtttgtgaaactataaggactgctgaattagtctgctggagctgccataaaaaatatcacagattgggtaatttaaacaacagcaatttattttctcacaggtctgaaagctagaagttcaacatcaagttgtttgcagggttggtttctaatgagggtcgttcaacttggtgtgtagatgaccatcttctctctttattcacatgatcctctgtgcgtgtttgtctcctagtctccttataaggagaccacttacattggataaatgcccactcatataatctcattttatcttaattacttcgttcaagtccctatttccaaataccattacattatgagtattaggggataaaatatcaacatatgaattttagaggggacacaattcagcctccataacaatgttcatcattgaaatgtctaagttaaataactcaagacattaaaaattgatgccagtgataaaaacaacattaacagacgcttgagaggatcctatatcttctcttcaaatgcttcacttctgaaataaagaatattttcagagtaaagtttataagattttttccaaacactccagaaagagccatggaaaggtctaatgctaataacatagatgtgcacttgttgtatatctggaattcaaaactctatgataatcatcattctgtcatcttttccaatggtgttttgcatttgtggcttaaaaatttctctcttcccacatttcatgacacacatacaacattttagctaaatttctagagtctagctgataagatataaatcctcaagaagttgcatctgagcatttttttttgctttgtttctccctcatttttagtgataaatggttcattcaagcttaggaacaatgtagtagtataacaatggtctcatcagaaatggtacaataaaccaaatgaagaaattatgtcctctgcattcccatctttgacagaattaacaagttgtatgtacaatattagggtcggcagaggatgactttttttccacagagtccctgatgctggtggtgattggccagcaaggaaagtttaaatgagtcttgcttttttcttctgtgttttttcccctcatacttttcactaacctgtagagtctcagattctaaacctgtttcctgtctgccaccatcctttcacttctccacttgttttgtccccatcctgcctgcctgttgaatactatctatccaacgagttctggccaagaactcagtttaccttctctggaatgccttccctgactgggccttcaatacttctgccctttctagatgttcgtggacttctataaaatgaaacttttagaagacagaggaatcttcttgtccttgggatggttttatctcaccaatgctcaaaaaataagtgttaagtgaacaaataaatgaatgagttaatggggcccttacttttggcatagtttctgtattaattatctattactgtctaatagatgatcccaggacttaaccacttaaaacaataaacatttattatcttacagtttctggatcaggaatctgggagcagcttagctgaaatctctctctctcaaagcctctcaaaaggctgcagtcaaaatggcagccagggctgcactctcatttgaaggttcaatggagacaggttcttgttccaagctcgttcatgttgttgttgacataattcatttctttgctggctattgcattgaagccttccctcagttctttgtcacatgtacttctccataggaaagctcacagcctagcagctggctttgctcagagccagggaggaaatggaagagggaagaaggatggaaattagagtctgagaagtgacagctcattattttgctatattttatttcttacaaatgagtcactatgtccacctagctcaaggagaagttgtgtccgaaattggtgggttcttggtctcgctgactttaagaatgaagccacggaccctctcggtgagtgttacagttcttaaagatggtgtgtccagagtttgttccttctgatgtttggatgtgtgtttggagtttctttcttctggtgggttcttgatctcactggcttcaagagtgaagctgcacaccttagcggtgtgttacagctcttaaagtggcacatctggagttgttcattcctcccatctgaagtttgttcatcccagccagagttgttcattcctcctggtgggttcatggtctcactggcctcaggagtgaagctgcagaccttcgtggtgagttttacagctcataaaggcagtgtggacccaaagagtgggcagcagcaagatttattgcaaacagcaaaagaacaaagctaccacagtgtggaaggggaccccagtgggttgccgctgttggcttgggcagcctgcttttattcccttatctgaccccacccacatcctgctgattggtccattttacagagagctgactggtccgttttacagagagctgattggtcccttttgacagggtgctgattggtgcgtttacaaaccttgagctagacacagagtgctgattggcgcatttacaatcctttagctagacacaaaagttctccaagtccccactagattagctagacacagagcactgattagtgtgtttacaaatctttagctagacacatagtgctgattggttcatttacaatcctctagctagccataaaagttctcccagtctccaccccactcaggagcccagctggctttgcctaggagatcctgtgccagggccgcaggcagagctgcctgccagtactgcgctgtgcacccgcactcctcatctcttgggtggtcgatgggactgggtgccgtggagcagggggcagcgcccaagggggaggctcgggccgcatgggagcccacagggctgggggggtgcttgggcatggtgggctgcaggtcccgagccctgccccaatgagaggtggctgaggcctggcaagaattcgagcatggcgccagcaggccggcactgctggggaacccggcgcaccctctgcagctgctgacccaggtgctaagcccctcactgcccagggtggctggcaccggccggccactaggagtgcggggcctgctgagcccgcgcccaccaggaactcgtgctggcccgtgagtgccgcaggcagccctggttcccgcctgcgccatctccctccacacctccccacaagcagagggagccagctgtggcctctgccagcccagagaagggctcccatagtgcagtggcagactgaaggactcctcaagcatggccagagtggatgccgaggctgaggaggtgctgagagcgagtgagggctactagcatgttgtcacctctcaaagtgattacacaaggatatggatatcaggaggaaggaatcattgggtgtattcttagaaccaggcttccacagtcccactttcaatctgcttttttttcttgctgcacttagtattatttttttttcccaggaagtcagctataatcccctggaacatggttcctggggcctcaactctgggctggatataaacccaaaagttgattgtgtaactattactttaattttaaaaggtctcagaaagattcaaacccttgctcctgctgctcttttattttcattccgttgattgggcttccttttttttttttagaaaaacttgtattttaggttcagagtacacatacaggtttgttatataggtaaacttgtgtcacagaggtttgttgtacaaattatttcatcactcaggtactaagcctagtacccaatagttattttttttctgatcctcttcctccccccaccctctggtaggctccaatgtctgctgttcttttctatatgtttatgtgttctcttccacttacaagtgacaatatacagtattttgttttcttttcctgcattagtttgccaaggataatggcctccagctccatccatgttcccgcaaaagacaatcttgttcttttttatggctacatagtattccatggtgtatatgtactacattctctttatccaatctgtcattgatgggcatttaggttggtttcatgtctttgctattgtgaatagtgctgcaatgaacattcatgtgcatgtgtctttatgatagaatgatttatatttctgtgggtatatacctagtaataaaatgtctgggtccagtgacagttctgtttttagttctttgaggaatcactatacgtctttccacagtagttgaattaatttatgcacccactgacagtgtataagggttcccttctctttgcaaccttgctggcatctgttattttttgacattttaataatagatattctgactggtgtgaaatggtaactcattgtggttttgatttgtatttctctaacgatcaattgtagggagaccccctgaaactattgctatggagtaaaagatgaaatgctcctgattattgtacgtacaaaattgcatgcaggattgtgtaaagacaatgccaggttgggctgccagaatgagccaacagcgcgtaatgtgcttccccgtgcagagagcctataaacggacgtgcagtcagggaggtttcacataaccaggattcctatcccagaaaagcagatgttcatagctctgggaatggaatgtgattcttgtggagagcctataagcagatgcatgaggggcgcctgttcatatggataagatagggctataaacgtccttattttgccacagctcttctaggcctctttaaggttaaggcatactcccttctgagaatttctggtctaactggttgtctagcttcacatcctgtttctattgattgtttgcaaccagcttttgctgcaactgttactgctgattaatatcttgctaatcataggttatggagagactgtgtttctgttttaaggctctgttagaaattgttgatgcacacactatattgtaaattcttatctctgtatactgtacttctgcataccaatgttacgttaaagacttacttcatccccatgtgaccatctcacctcataatcaaacgaccctaaaaccctcactaacctacccctgccctcactaaacttaataataaatgctggtatatccagtgcattggcggcatcacaggaccagaaggcggtgacccccctggacccagctttcactatcttgtgtgtgtcttttatttcttgacctgttgatctgcctgggaacaaagaaagagccccgttgcattgcaggctgctggccagatcctgcaataatcaatgatattgagctttttttgtatgcgttttggctgcatgtatgtcttcttttgaaaagtgtctgttcgtgtcatttgcccactttttttgtttttttttcttgtaaatttgtttaagttccttacagaggctagatattcaacctttgtcagatgcataatttgcaaatattttctcccgttctgtaggttgtaaacgctttgttgatagtttcttttgctgtgcaaaagctcttaggtttaattagatcccattcatcaatttttatttttgttgcaattgcttttggtgtctttctcatggactctttgcccatttctatttccagaatgatattgcctagttctcatccaaggtttttatagttttgggttttacacttaagtatttcacccatcttaagttgatttttttatatggtgtaaggaagaggtccagtttcaatcttttgcatatggccagccagttatcccagcacatttattgaataggtagtcctttcctcattgcttttgtcagctttgttgaagatcagatggttgtaggtgtgcagtcttatttctgggctctctattctgttccattggtctatgtgtctgtttttgtattagtaccatgatgttttggttacggtttggattcttctattattattttgagtgattgccctggaattttagctttctttactctgtagaccaaactataattctgggtttcttattgacccattatcctcaaataggattcctcccactatgtcactataaagaccatctggtttgagactggctaactcttattaaagtctcttcagaaaccataatgggaaaacttcgattttgtagaatactactgcatgaacttaatttaggttgaagtaatttttagggttaatgaaagaaaagcttattcttgaaacatcaaattactgaaatatcaattctagttgttaattcaaaactgacaagaatatgcctaattaagcatgtgctagtccattaatataggtagttagcaactcttactcaaggatcggatgtattagaactggatattgaagatctggctctgatacttgctgtggcaataatatgtaaatgagtgtaggcctttaggcaaaaaaaaaaaaaaaagtaaatttggaggagtatagttaggctgtcattatgcctttttaattttctctaatattaatagctaacatatattaaacacttaggtaaatctgaaagctttataagcattatctaattcttatgtcaaccttctgaggtagttactacctccattttcaagatgtagaaatggagacttaacaaggttaggtcattttgccaaagatcacataatatgatgtggtagagatgagattcaaacatagatttggccccaaaatatgtggttttaataaatttgccatattgccttctctaacaatacaatttagtaacattcattcaaaaatattttttgaatgtctgctatgtgccaggcactttcttatatatggagaatacagaataaataagatggccatgattcctgattttactggaagagacatgtaataaacaaacacataaataagaacccagaaaatccagttatggtctgagctgtgccatggattgaagtaagatgaggtgacagaataactggatgacaaatttatttatttatttatttaagatggagtctcaccctgttgcccaggctggagggcaatggcacaatctcggctcactgcaacctccccctcttgggttcaagtgattctcctgcctcagcctcctgagttgctgggactacaggcgtgtaccatcatgcccggctaagttttgtatttttcgtacagacgaggtttcaccttgttggctagtctggtttcaaactcctgacttcaggtgatccacccacctcagcctcccaaagtgctgggattttaggcatgtgccaccatgcctggcctggatgacaaatttagaggtgagtaaaggaaagtctctttgaggagatgacgtaagctgaagtctgccttacagtaccatgcagtggttaagagctgggactttggagctacttgctacttctctcatttactagccatatgacctcagccatattatttaaaccctgttccttagtttctggcagtgtaactgcttgtgggattgcatgtacaagttagtatgtgtatagtgctcagaaaattgggattcttggcatcttgtaaacagtatataaatgtgaattattattataagtaggaataatcatttgaggagtaaagagaaaaaaattccagacaaaggatgcaactgacacaaagaccttagggaagaatgggctgggtatgttcgaaaacaggaaaatcaatgtggctgaatcaaaatgtaaagaggagaatagtaaaagatgaagttggaaacacaagcagggacaggccggattactagtactttgtaaaacaatataaagagttgctccaagtgcaaggagaagtcagggaatgagattttgagcatttctccaacttggcactattgacattctgagccagataattctttgttgtgggacactgtcctgtgcagcatccctggtctctacccagtggcatctatttctctgagttgtaataaccaaaaatgtgtcaagacctttccaaatgtccctttgggggcaaaattatctcaattaataaccatttatttttttaaaaatccacttggactctcatgtgaagaatagattgtagtggagcaagaatgaagaaggagaccagttcagaggctacagcagtttcctcgaagacagaatattagtgtttggactggagtagtagacatgagaagaaataaatgtctttgtgatatgttttggagatagagtctatagaacttgctgaaagattgaccatgaagtgagacaaaaggagaaatcaaagctaactcctaggtttgagacctgtgcaattgggtggatatagtaccaagatgggggaacactgggagaaaatcaggttttgagtgaccacaaggaagtcataactcctgatctagatatgttatgtttgagatgcctccggacatccatctggagatggtgagtcagcagaagtgaggtagtactagagatataaacttgctatcactaatacatcgatggtgttaggtcataaatatgaataaagccatgtagacagcatgtgtagatagagataagaacccaagacagatccctgggacaatccaaaatgcagatgtcaaacaaaagaagaagagctaacaagggagactgagaaggaacaatgagagaagagaaaataaaaccattcaagtatagtgtcccagaagccgaatgaagacactggttaagaaaaactaaagagtttattgagtcagatactgataagtaatcataagaagatagaaaactgatcgttggagttagtaacataaaagccattggcaacttatacaaaggaagacgtagaaaggagtcatgaagacagaaacttgagacactttgctgcaaaaggagtaaatgagctgaagctagaaggagatgtgctcttaaggaatacaaaaaagaccaaagacacacagggcaaggtctccctccaagctatcatccagattctcttctccaaataccaccacagcttcagtttttcctattgtcatagcgatatgatatgagggagacaggcagttaggtaggtagggagggaagtaggtcggcagacacaaacacatgtacatttttaatggggtttagagcctctggtacttgggtagctggcactaggtccattaatgggactctgtaggcacgtaaactcacagcaaggcttctgggacaaatgtagcctgcatcttgagagctgattccaggagctcagatagcaagtcagaaagtagcactgttactgaaaaaccaggggttcaggctaggtcctgctgcttgccacacagaaagccaaccactgagatgacgattattgcctagaaagaaggctttaactgagtgctgtagctgaggagatgaaagctcagcctcaaattcatctccctaactgactaaaactaggggtttatatagcaagagagaaatgtaacaatgtgtaagaaaacagaaactactactttttttttttttgagaggcctgagggtcctttcctgaggaaggaactcagataaaacaaatacaagtttcaagctttaacagcagaaggggctgggcacagtggctcacgcctgtaatcccagcactttgggaggccaaggcaggtggatcacctgaggtcgggagtttgagactagcctgaccaacatggagaaaccctgtctctactaaaaatacaaaattagccaaatgtggtggcacatgcctgtaatcccagctactcaggaggctgaggcaggagaatcacttgaacccgtgaggcggaggttgcggttagccgagattgcgccattgcactccagcatcggcaacaagagtgaaactccatctcaaaaacaaacaaacaaacaaaacccaacaacaattaaaaaaaaaacagaagaagggtcaatttctatgtttacccaaaaacaactgtctatgagaatattgggcccatttcagcagtagaggtcagatatacccatgccctaggcattaccaggatggggacactgtctggaccccaggaagacctatttctccaaaatactgtgagaactcagtctaagccaagtctaacctgatggcttgaactaaggtctgcactgtggccttcattttcggtgatctagatctctgagctcacaagatatttatcctggtgccaccctagtgaaatcaatgacactgtaattcccattacctagcacagtgtggctgcttaatcaatgctcatttatttagaaataaatgaataaataaatgaaggaatatagccagttttgttgcttagcatcttttactatcttatatagattcagctttcctggtgtcagtattgtactaagtaatattctttgtgtgagtacgaaatagccaatgtgcatcctgcaagggctcaggtatgccaaagcaattgattacaaggctgcttcctgtagctttctccagccaaaaaaataaaaatagccgtataggaacatactgctttccctttctataggcctccaaccgctaggcataaatttcttttcaaactttccagaaaaccttacccttggactaagatcaagaaaagaaactgcaggcttttctcagagaaaatgcaaagaagatttgactgaagtcttatggttacctggccccaggcctgaggggctgtgtcttggcactgacagtggaagccgaggaagatgggagcctgctgaaaattgcttctgacagaaagacaatcatgaagctgttttcccgcaggctgtcatgccaactcacaaattccttaacttaaacatacacaaacataatcctcataagactcttgactcttttctcatatcagtcacttcttactgtttgtagagactctaaattgcattactttaagggaaaaaaattggcttccttttctcaggacacaaaaccaagcataatatacaattgtggtcaccaagatggtaagacatgaattttgagtcttcctaaatattgaatctggcaacaactttagagcaacactttaaaattgagtccgaccccaaactattctgactcagtgcaaaaatggccccactaggcttcttttataaagacataaaatcagcctaaatgcccatcgatgatagactggataaagaaaatgtggtgcatatacaccatggaatactatactgccataaaaaacaatgagatcatgtcctttgcaggaacatggatggagctggaggctgttatttttagcaaactaacacagcaacagaaaaccatatacttcatgttcccacttataagtgggagctaaatgatgagaacacacggacacatagaggggaacaacagacactgaggcttattggagggtggagggtggaaggaaggagaggatcaggaaaaataactaatggactaggcttaatacatgggtgatgaaatagtctctacaacaaacccccatgacacaagtttacctgtgtaacaaacgtgctcttgtacccctgaacttaaaagttaaaaaaaagtatctgtactgggtatctgtaagaagaaagctgatggttgaaaaggcagaagttggccttttgaggttttctggactacccatgatacacatggctgctttgctgcctttcaatgcatccctcactgtgcaccaaaggaatcttttaaaatacaaatctgatcatgttacacacaaactcccacaaagtctacatggcctggcatggtgtagcctctgtacatgtttcctatttcattgcttacctttggctccagctacataggctttgctcatttccttcaatctgtcctcctccctcctaccatgtccttgcacgtgctctttcatctgcctccaattccacctggttaagttttacacttctttataattgctgctaatttttacctccccagggaagcttttgccaaattctatgaactgggtgacttctctatttttctattctttgctatttaacacttactgacattcattctagcattgaactataagctctataaggatagcgatgtattttcaagtgtttagaacgatatcagcacttagatattccagaactacttgttcagttaagaaaaacacaccctaaggacagtgaccaagacactacaaacaacatgtcttctgttgctgggattcccgaggatttttgccatacatctttttatgtgacttctgggaaacaggaggaagcaaatatcatttgggagagcagatctattaaaaaaggagcttttcacatagccatcaaatggagatagaaaacaggtctctaactctttgaaacattttttcccttgactatgatgcaaataaatttccagttcttgttcctggccaatttcagctcaacttagtttagtgaaacataataaatgttttctgaggacctttttttgtggcaagtattatgatggtagctgtagagtatacaaaactgagtaaaacacactcttggcccttagaagttcatagcctggaagtataattttaaaaatacacaaatagtagaggaatatgttaaaacaatgctctgaaggatccagggagggaaggatttcctggaccaccctattcctgcatcttcgcagggtgggacaagggggagggacctgttgtttttcagaggccatgtagtacaagttatgcaagtgaagaagtcactacagacagtttattttctcttgcagctttaggtctatttatagtccagttcctggggtaaaagtagcttattaaagcattgtattatttgatgcataataaagtttgtatatatagctaatacttctattaaaatgtatgttgaattaatagcttttcaaaatctaccatttgataatgtatcaattctatagtaatcaaaagctaagaaaaggaaatagaagttcattacctagatatttccattaaaaacaatcagctgtttaattcagctagagaatttattagttttaaagactcttgccataaagtaaaacaagaaatgtgagaatacaacctttcaaatgtttccaaagcagtttcaaagttcctgaatacatattttatttagtgagtagcacctatatgcatagaattcagataagcattatgggaaaacttaggaaatacaagtttaacagcaatacaaaaaccacatagcagtaggagagaattggacttaagatatgtgcccaatgaatagtgcaaattttaagtgccatattaaggagggagatctcacaaaaggggctttgaggtttgaaataacaatgccagctaacaacctttatatatatatgtgtgtgtgtgtgtatatatgtatgtgtgtgtgtgtgtgtgtgtgtgtatacacattttagagatgggggtttgtcatattgacccagcctgttcttgaactcctgagctcaagcaatctgcccatcttgggctaccaaagtgctgggattatgggcctgagccaccatgcccagtctctagctaacactcttataagcacttattcaggcattctgctagtcattgatgtgtgttttcttattcaaccctcacagtcacatacacactgttaggtaacagaaacctgactgaaatgggagagttctctgaccctcttatgggacttgcaacaggggtgtggcttgtttgcttggccactgcacattcaaaccccttaagggagggggagcacacagacaggcaggtgcaggagacggggtgagcgcttttgggctctagccccatggcagcatctaggggtgtgttacaattaatgctcttttagcagttgctgttcgcggatggctaagtgttaaaccagctcagtggagagtcagggtggcagccttttacgccctgtcctcttggtacccgggtctttgtctagcatccaggaagaatcaggtcctacagacttgaaggatggtgaatacagagattttattgaatgatggaggaggctttcagcaggatggatggggagctggaaagcggatggagtgagaagataatcttcccctggggtttggccatcccatggctgatctctctgacagtccccagccgaactcctctcgatgttcagacactctttctcctctctcctctgccacactgctctgctgctcttctgctcatggagcctgaggtttggagtttttatgggtacaggatgggggtgtggtgggccagggtggtcctggaaaaggcaacatttggcacgaaaacaggaatgcctgttcctatttagggctgcaggtttccaggcttgaggatggggcctttgccagggaaccgctctcttttaaccagtatttccctgcctcttgtccatatcataatcacagtggcataatgaagtaaagactcatccttcgtcacataataacgttcaggagtaggcagtctggggctgatacaaatgcgtgagaaaccatcaagtttctagcttcttctaaccttcagctgcatcatgctcagtgtgtgttttttagccccatggttataaaatgactggtccacttaaggcatcgcactggcatcccagtagaaagacaacaaaagcaacaagtgcaaataaatggaaaactttcctaagattttctagcagacttcagatttccactccatctcgttggttagaacgatatcacatggacacccagtggcataactggttgagaaatgaaggctttttgtttttctttcatctgacaacatagctgcctaaaaagctatggagttggatattggtgaagaaggaaggaaattgacatcaaatagacatttagcagtgccaccacagatgagtactactattattctcgttttgcctgaggaaacctagacattgagagttaagtaacctgcccaaggtcatctagttaatatgtagaaaagccggatacaaacacaggcaatctgatttccagagcctgaacttttaactctgtgctaggatttgaatctgagagtagaaggaaaggcaatttgtgacaggaagatagtgttaacaaaggtgcagtgcgtgtgtgcatgtgtacgtgtgtgcatgtgtacgtgtgcacatgtgtatgtgtgtacatgtgcatgcatgtacattggaaccctagatgctgatcatgtgtgagagaggccctgaggctggaataaaggagccatgctgaggagtggagggaagtcaggtgggaaggagatctggatttataccatctgcctgggtaagccttcaggaacatgaactgcgtcggtcctgaaattgaaataatgacaatatatatgcaaatattgtcaagaaggcatgaggagatgccaaatatgagcagagccagaacccagggtgtggtaaatcaaaagttgaagctggaacatcctaagaagcagtagccaaggtttggtccaggatgttctgcagtcagatgtgtccagcagtcaaagatatatgagctggaggccagggtctgatggtttggagttagagttggggaattagaatcctggaatattacatacctaggttcttgtttgttttatggcagtacatcccagcactttaggaatattattggcccattacttagcactagtttttaactcttatagttaaacgctgtaacatttaagaggataagatgaccccagactatgagagcacaaaagaaacagttgttttccatggaaacatgttacttttaaatattagctttacctttgttatctcacagggtaagtggagtgggaacatacaaaaataggtagaattaaaaaggaaggagctgtgcaaagtgatgaaccacatcagctttggattatatatttttcagtgtctttgttgagtacagagcttgcaccaagagatgtcagattagtgtaaggagaccattacttagaatatgtgaggctcagcaagagaacatggccccactctgagtggtgggctttctgacctggtagtgttcaaacagaggctagaagattgttgaggagagagatttcaaaattgctttctggataaagtttgactaaaaggatttcaaatctgcatttcataattgtacagtatgcccatctgaaatcgatcagaattgtaatctccaaaaagcaatctgaatctgcaaagcctttcctattgcttgcagactcagcagccctgagtctgctgctagtcaagtagtaggaaaagttgtgcaaagcctttgtcctcctcactctagtttcttctttgtccagttgaaaaagactagcaaatgaggtcttttgaagaatagttataatgactattctccagcaaccacgagaatggaattcaacttaaggtgttatgcatttatttaaatgtaccaagcctcagcatgcatgtgtctagcctttatatacatgcatatataaatgtgtgtctgtgtgtatatatatatatatatatttgtatgtacatacacacttatccacatttatgatgaaaaataaattcatgtttattgttgcagttaaactctggagctctgaaaccattgggtttgaatcccagctcctctatcttttagctgtgaatataggtcaagttacttaacatcttcgtacctattttctcacagggtaaagactattgtgatgattaaatgtgttatttattacctataaaagacagaatatgactggaatatagtaaacatccaataaatgatagctattattattctagactttctagaaaatacataaaaataaaaagaagaactaaaaatcatgtttattctgaaggggaaccactgttaattctgagcatatcttcccagtctttgttcatgtgcttgtcttctgtttactctcactctggagtcatgctccagggcctaggtttccaatgcacatgcatgcacacatacacatgcacatacacagaaatatacgtgcacacatgattttatgcttcttgtaaaagttagaatatgtaccttaaagattagtataggggaaaagggaaaacttcccctttgccttccgaagatttgcagaaaatcactgataagatgcatattaataggagaaaaggcatacatatttattaatgtgtacatgggagcctttaaaattaagacccaaagatacaggggaaattgtccatttttatgtttaggtttaacaaagtatgggcagcaagtagaaacatgattggacaaaaaatatgatctaatgttaatagactgagtggggaaactcagaaaggtctgtctgtctagatttttcttcgcctctctgagcatgtattcctttttttggatatggcacagggccctctctggaatgggggtcttatgacctataatcaaacaagataagtctagttatctaattttttagtggccagtttttgtgcagttatagtggagggaaagttagagtaaaatttttagattttatggctggctttgggtaaaggggttctagtttctatgacccaccttgagtaagacagattctagtttttatggctagccttgagagagaatgggattgagagatagtagggtaggagaaggtcagagaaaaatttctgttttgaggctgcttctgcggccttcattttgggtatgtttttctgagtcccaacattagacaatcctacacaaatatgtattcaggactaaggtcatggcttgttttaatagttataactcttaaatgacaattgagtcatttttcaaagagaataaatattttgccattttttcattaattctcggatcagcgaaagtatatattctaaatttgattgctttatttaaatatttatatttttcagttacataaacatggaaaactgtaaaataaaaatgaatgtcttatttacaaaatctttgcttcagttagaaagggaaaatgagtatacacattacagaccattcatagaataaaataatgtgcattttaaaaagaatgaggtaactctatacacactgacacagaagaatgtctatgacggggaaagatttccatgatgcttaaattaaaagcattgtggaataataaatagagaatgaccgtctttatacatagtgttttaaaattttttttagctcatcagctattgttagtgttagcgtattttatgtgtggctcaagacaattatttcaatctggcctagggaagccaaaagattggacacccctggtctaggcagtgctgtggtcaggtttgctgagtattctgtaggtggaatgtaaaatccaagataatgcctgttgaacttgctggaaagtgcaccaacctgatactgatcctatctccaggctgggttcaatgctcctgtcttcatttccaagtttccaacagaatcttgtgcttacagtcatcctagaggggatcaagctttatactttgttttttctgcttacttgtctgtctaccctatcagattttgaggtccctgagaacaagaaataccattttttgtttttatttttaaatctctgtagtcccaacatttagcattgtgcctagcataagcaaccaacaaatgttcctttgatttgtttgatttaatgtaattttgtataataccgagttggtgtttgtttggaaattctgctttcttgaaaatgctgactggtgccaggttgcccagcacagaagagactgttaggaatggatcaatttctttctttcttttctttttttgagatggagtttctcttggcatccaggctggagtgcaagggcatgatctctgctcattgcaacctctgcttccagtttcaagccattctcctgcctcagcctcccgagtagctgggattacaggcacccgccaccacgcctggctaatttttgtattttttgtagagacggggtttcaccatgttggccaggctgatcttgaactcctgacctcaggtgatccacccaccttgggctcccaaagtgctgcaattacaggtgttaggcaccactcccagcccattttattattattattattttctttttttagaggtgtggtcttgctctttcacccaggctgaagttcagtggtgcaattgatagagacaggagacagccaaatgctgcccaggtcattgtgtacaggagggttgcctaaagatgcccacaaccgactaggggtccccttgtgcactgggagaatggggtggagccactgggaattctcaccttatggagtggggaggagccctgtctcttcagctcttgtgtggcgggctggtattcaatctgtgaggtggaagcctgttggcaggaaccccccattttaattttttaattttttttttgctgagagctttcttttaataaattccactctccctgccttccaatgtgtctgcatgcctaattttttctggttgtgagacaagaacctagattttagctgagctaagaagcaaaaaatcctgcatcacaatcatagctcattgtatcctcgaactcctgggtgcaagtgatcccatctcaacctcctgagtagctgagattataggcatgagacaccatgccctctaagaataaattcctttcaaacattacaagctcctcatcttttccttttgtcacctgaggttttagacatacactggcctcaatacacataatccttggcactttcttttgaaacaactttcaaaactactttaagttgataacaatcaacttgaacacttggatgaaattcttttgggtcaggaggttcctgctaagctcacatgtaaagaaaagaggacatagtgaaacacctgctttctgattgcagatagaccaataatgtagcaggatgagccgcagacaaaagctctcagacaccgagttatagtaggaagggctttattcagcagggaggatcggcaagctactgccttaaattctgagctccctgagtacacaatttctgtcccttttaaaggctcacaatactaaagatttcacaagaaagggtcatgattgatttgatcaagcaaggggtacgtgacaggagctgcatgcactggtggtcagagagaaatagaacagggcagggagtttcagaatgttcttctatacaatgtctggaatctatgaataacatcggtttctaagttatgaattgatttttaactactgggtttaggccaggcaggcccaggcctggttttgggcctggcgccgggctgcctgtctttgatttcactttctttttttttttttttccttaaaacaggtactgagtataaaacaatatagaacaatatgagagggtcgctctctttcctcattttccccctttgagactctcactttttattagtgggagttctcactcttatttttgctacttatgtctttttgtgcaatagattgatagtgattcatatagtacacttgtgctgaagcattttggtgaactaaggtagcaatgaagctttttatcatttgaagaagtaaaagtagtaaacaagggagcagtaagcaggtttttattactattataactcctattataagagttttaaatcttcctattgctgggaactaatttttaaacatggatcctggattgagtccgtgccacacttgtatgggtacatgtgccagttttgttatatctttaactatatttttaactacttgcccttgatcacctgtgtgtagaaaacaattagtaaagttaaatttttcacaaacttctctttcagctgctagcaagtagtcaagagctagtctattttgatagatagcatttctcatcagagtctcctgctgggcaagaacagtcaaggcttgaccggttgtattagtaataatttcgaaaacagcttgtaaccgtatgattccgttgagcatgtagatgggggtccgatatccccaagagccatcttgtgcccaagtggtgggtccatagtattgtatgattctttcagggggccatttatcatctttccaatcacctatggctatgctttgttttttgcgggaagcatagactgggaagcccagaagttcccctgcttttatgggcagtaagaagaaagatggtttaatggtgtcaattacacagctacctgtccactgatcaggcagcttagcataagctctgtgtccacatatccagtataacctggtgggggccgtccagtcccggtggaattctgggtgggcccaagcagtctgcaactttggaaattgactgaatggatctctttctgtgtaattggaactccaccatgtaactgtatttgtggtaccattatacagcttttgcctaagacaactaagccgccttataggatgagtgaatccttttccttctctagctatgcaacactgtctaataattcagacttttaggacctaaaaattgtcagggtggttcttttgggctgggaattcatcaggaactgggtctgtaggaactaattctcgggcttcttatggaagttcttcttatggaaactcttactacagtttttccacaaacataacatgaattgacatttaaagactggactacatgctcggctaattgcaaaaacaaatttctggtttttcctggagtctctggtactggcacatttagtttatcataggaagtctgaaatactggttctggagagcatctttgaacccctccttttattaggatgcttacactaggatctagtcctcttccatcaatgcctaatgttacatattttccttcatttcactttggttctgaggggtttgtgattatcagttctaaagggttgcagctcccactcatgcaggagggggctgatttttcctttttggagccaaacaggattttttttatcttttttccaagtagcctaaatgacacgagaccagtattgacacatctcataaaaatatgatttttgacagatatacttatttttttactgtgtaactttttttccaatttagagaactgcatcttattccatgctgcttactatcaatagcagcacaagcgtcaaattttaaggttagatttttggggacccctctttcttctgttctagctattaccttacttgtgtcacctagaaaaggacaagtccttaattttattttaaaaactgtgatcatgggaggcttaaaatgggtcataacacacatcaggttggttatttcctgggctacataccttggatagaatagcattatacaaacaaatttcttttagagtcctggtacacttataataaccataaaataataggactgtagcaatcttttgtcctacctcagtgacttgatgtatatactgggaacagttctcagtctgaggaaggtcagttgaagtccttactgtacaagtccaaattttaaggaaaatgagtcccacgatgagtttcctcatgcttcggccatgcgtgaaccagtcagcttccgtgtgtgactggagcagggcttgtggtcttcttcagagtcactttgcagcggttggcgaagctgctcccatccacgtacagctcccagtctactgatgtttaagggtggtctcagaggttgggcctactagaataaactgagtccaacacctctacatagtttaagtttaactgggctctctaatatcaggagtaatgtggcggggttaggatgttgcaaacttcaatggttatgcggggattttcacagagcaagctttggtctcttgttagtctagcattcattagctaatggtgtcctttggtatttattaaaatcaccacaacattggggggactttatgtttaggttttgcctaagagttagcttatctgcttcttgtgctaacagggccgttgctgccagggtccttggacatgggggccagcctttggaaaccccattcagttgttttgagagataggccactggccttggccagggccctacagtctgggttaaaactccaactgccaatttttttctttctgacacatagagtgtacagagttttgtcaggccaggtagcctcagggctggggccgacatgagtttttctttttaactcatgaaaagctcattgctgttggttgtaatagatgtagttcatctaatctacatttttattgactgtcatctactaaaatattgacttaaatcctgtaactatttgatttcaagctttaaattaatctggtattccttgcggggctccaattgcatctaaatagatgtgagagttgaaagacctataaggggcttctcttgctttatgatgtcttattattattttttttcctctggttgatgaaatgccagggtgaaagggatagccaaatggactaaaggacaagtgccactctagttattcggcagagtgcccagtaaaggtccaccacaataccaccacacatctgctcagggatgaacaagggaagacagattgataagctcttgaaaattcttaagctcactgcatcccttcaggtctacaaggaatgctaagtctcctccctgctgtgagagacaagaagtgaacttagtgttgggagacggaagctggatggccctcgggggctgactggcagggacttcgggatatagcagagagagcttggcatgacttattactcctggctgcagaatcctggaaaagagctacatgcagcccacacctggtcaactgaaggaccaccttagtggaagggggacaatcagggcctctggcctgccatgtgcacaagcataacaattgcttttgtttaatgtgcagatggaatatttgatccattccaaccaggcatttgcatcttggtatgctgtcttaattgccaaagtttgttttaagtcttcaacttctatgatcctctagtaaaatgaatgtttccttcagcaccaatttttattagtttttaaatcaaagaaagctaaacaccattttatatttaataatgcttcttgtatgatttctataccagatgagttaagttttacctttttattagtgtgttattaatgttaaacttaattttaataaaaccttgtagacatatttatccaattttttatgtttgaccataaggtaagattttatagactctttttaatcttttataatttttgttaaagagcaagttgatgctttaagaaaaacctgttgcatttttactttaatgtccagttcacagaaaaactggatgatacctttttaactttagctaatatgtttacccacagaattttctttaaaattaatattttaaaacttgcttaaactgttaaaacaataatttttttaaccttttaatgtaggtaaaaattaattcttatgcctccttataattttttttaccaaagttatattttacttttcttatacaccttgtacataaacagtttctttaatagtactcaggaggccttattacttttaaattatacaacattttttgcataaaaatttttttataacattttcttttacgactttcgcagacaattttttaacatgtctcaactttctgacttattacaaacagtgttttttttttaacaaccagttaatttattttaggagaagaatttaccttataacactctttttacataaattctgcctcccccccttttttttttcctgttttttttttaagataaccattccttttttttttttttaaagcgaactttctttatgtctttggactagacagtctaaggccacaagattagaagttaccataatacatgttacactgttaacttttagcaaacttcacttttgttgaaaaccttgtaagtttgggatttcaattatcctttgctattaataagaccttgtttagtctaaattaacttagaattggtatagatggcctctttttctctctgctggtctttccttgcctctgccagccgcttatgctgctgttctcttaactactgtagcggggaagggggtctaaaagcagctgtaattgtctatgtactgaaactggtctgggtgccttggcttacaggttaccttgtgtcatacctttgaaacaaaggacctgtccaggcttccttctgatggccaacccacctctaatgctggccagtctatttcacacaaagttctaagttttcctggtgtcacagtaacaccgtaatctcccttaaattctttcttgaaaattttcttttaacatagttcctagtggggtgggcttatttgtgcctgacccatgttttttttccgagacaaaataccacgctcacaccacacacactcaccacaagaaaaagaacgggtaaagaggctgcacacacacttttaccgtttataccaaaccaaaatcacgaaattcaaaatccgagtaccaaaaaattcaagccaagtcaaaatcaaaaccaaagtatccagcaattcaagtcaagtcaaaaccagaacaaaagtgccaatgcaggcacgctgtgggtgatcaggccacacttccactcagatggagtggggcaagttccaaagactagtcttaccaagtcaagccaagtcaaaaccagaacaaaagtgccaatgcaggcacgctgtgggtgatcaggccacacttccactcagatggagtggggcaagttccaaagactagtcttaccaagtcaagccaagtcaaaaccagaacaaaagtgccaatacaggcacgccgtgggtgatcaggccacacttccactcagatggagtggggcaagttccaaagactagtcttaccaagtttcagatgtcgcgactccaagtgccagttctttccggtgttcagccaccgtgttaatcctctgcaggggcctgctatgcgctgctctggcaaggcattccaccggggcaatttcctacccgggagcgttctttggatcgcgtcactcaggctgactggagtcccctgcagggacgctccacaggacaggcctaagccgcctaacgggttagctctgccgtctatgtctatcagttacctcgtttcctggtcagggaaccaagaaatgtagcaggacgagctgcagacaaaacctttcagacactgagttgtagaaagaagggctttattcagctgggagcgtgggcaagccactgccttaaaatccgagctccccgagtgcacaatttctgtcccttttaaaggctcacaatactaaagatttcacatgtaagggttgtgattgattggagcaagcaaggggtacatgacaagggctgcgtgcaccggtggtcagagagaaacagaacagggcagggagtttcacagtgttcttctgtacaatgtctggaatctatgaataacatcggtttcgaagttatgaattgatttttaactactgggtttaggccaggcaggcccaggcctggtttgggcctggcaccgggctgcctgtctttgatttcacatccttgtttttttttttccttaaaacaggtactgagtataaaacaatatgagagggtctctctctttcctcaatatgactacttaaattggtcaaggaaatgaactacagggaggaatatctgctttgtacaaagatttttttaatgacactctttaaaaaaatgattatgtatatgtgcattttaactggattctcaaagagatatgggaccccaaaaggcaagtaacaactgctcagggcaagtaaagagaacttggatttcaaatggtaacctcctaatttgataggaagtttcttgaaaggaaggataacatctgagtctctttgtagttcctgcaccttgtacaacagtattcagcatacagcaatcagtgggggattatttggaaaaaaattaattgatgaaaaaagcaaggcctactcgaaaaccattgctatctaggaatgacatcatttgacattgctccttacctcacctacagtgagcatgccaacttacaagcgttaccagaaagaaaataccctcttctgaaatagtaggaattagctatttcatttgtacatcttgaaatttccacactctttccatgtccaactactacctttaatttttatttttatggtattcacatttgtaaagattttatattcgatcctcaaaaaattctggggatgcataggtcttccaggaagtacgacttcagtgacaataaaaatgaggtctgatttccctcagataggaagtctatttttctatttccttaaattaacaagaaaagagcagtggtcctgtgaaatcccatatgaattcaagttataaacatagaacacaatcgacgtgtaagtctgtaacaacaggagaccagagtaacttgtaacagcaggtgacttttctaacaaaggtcacactgtgtgggctaagctagcacctcatcactgcaagaagcaaaacaaaaggaaaaaaaagcttctctctctcttttttttttttttttaaagcagcagcataattcgctggctcagcaaatgtttttccctgttatagtttgggaaagaaggcaacttggaggccttgtttacccttagcccttcctcccgcccccgactgtaccattaaatcctagattctagggtgactgaaaaggatagggaataaattagtaattgtcaaaatgttttccccatattatgcatggcagcacttgctactttcttttaagttgataacaatcagctcaggggtttgctctgcttgcaaggtcactgcaagaatgaacattgaactttggactatacctgaggggtgaggtaaacaacaggactataaatatcagagtgtgctgctgtggctttgtggagctgccagagtaaagcaaagagaaaggaagcaggcccgttggaagtggttgtgtaagtaggaacttcgtgttttctgatactttattcttttaaagtttggtaaatattttttgagtctgataaattgtttttttccatagaatagattcagaaaactggtggatagaggaaataaaaataataaaagagaaaaagaataagaagagtctgaacttaggtgtggtaggtgaagttcccagtgcgcacatttgtcagttcttgatttctgccctgtcttctgcacagctgagagcagaggaagctggagaaatccaaaccttttattctataatctgttgtgatgttacataggcagtattatatgttcaaatttaaatattttccactgaagggcagagtaagaacaaacagggaaaaaacccagccatttggatttgaagagcagacactgaaatatgctcattctagtgttgtagaaatgtccagggatattgtgagcagtttcagaagaaaaagtggtggaatggggtacagtaggttcagtccacagtgcagaagtggtcacccttaaagaagctaaaacccatgtcaacaattaggtggtctgtgattaaatgcaaacttttgtattttaaatggtgaatgagagcattcaggtgaattaggggctttcagatgctggcctaaagttcagaggtggaggacagagaaagtttgtacatatcctgctttttaatgagtaattttaaataaatgtaggtctgaatgtggccatgaaatttaagtttcgcaattgaaaagtggtgacatagtgaaatttacaactacttttcaattcttattggatcagcttccaggaaacccaattttgttatttatcttcattatttttatatagctgtctgacaactataattatcaaaggtttacggtgtaagaaataattttaagaaaacaaaattgagcagcctgttgattataatgacagaagaaatccgaaagtgtgaactcttaagctacaactctctgccaatgggttattttttcatcataaacctaaatgagggaaatgagtgaaacagtcttttcatttgtattcaccattcagctacttgcaatatgtgctctgggctggacgcggtggctcacgcttgtaatcccagcactttgggaggccaaggcaggcggatcacgaggtgaggagtgtaagaccagcctggccaacatggtgaaaccccgtctctactaaaaataaaaaaattagcaggacgtggtggcgagagcctgtaatcccagctacttgggagggtgaggtaggagaattgcttgaacccgggaggcgaagtttgcagtgagctgagattgcgccattgcactccagcctgggtaacagagcaagactccgtctcaaaaaataaataaataaataaatagataaataaatatgtgctctgtggcaaagtgaaaaaaccaagtgctgattttttgccaaggttctgtaactactgaatttgtggtctaggaaacagagaaaacctagcctttctattaagaaataaaacagcttgaattatttttatgttttctttggcatcttagtgcataaacaaaaatagttggcggctatagttattacaaggtgatctatctaaaaactctcaatatattgcagtagctaagatgtagcttaggatttgacagaactagttttaatccagtctcttttgtgactgactttctctctgtgtgatcatagacaagttacctaaactcttagccatggtttttctcaactgcaaaaggggataatggtcacataattgttttaaggattaactgacatgatatataaaagtgcttagtgccacctgaatatatttgtataaaagttaaataaacattagctataataaggataattgtattatcattgtaaataccattctagaggaattttctagaaacagtccaaatatatcttcttcttcttcttaaaatattagaatattttaaatattaaaataagtagttggagtggccttaaataagtaagttaatttgtcctctctctctacctctctcacctcactctctctagttaagttcttatcaagatatcatatataggtaagagttttgatgtgttaaataatgtgaaagacaatcagggttaaaaattctatctatatctaccagtgcattaaagcccagatcaatctgattttaacttttctattcttctcttaattctgggctcactctaagtaatttaccattagctccccacctccaaagaaatgcatctgcttttaaaaatttcaaatcagtgcttgaaaatatattgatttcccagttttcaaattttgtcctgatctctccccacagattcttacatcaaaatgagcctgaattacttgtgaggatttttctttgctcctctctgctgaatgtgttcctttttctttatcacctgtctacagttcacctgtttttgaacatttctgtttagagagctagccctagttttgaggatatttctagtcaggtatttaaaagcattttaatttcgttgctcagaggaagcatctttttaccaaagaaagtgctgtctagtcataggaattttctagtcataggaactttccaataaataggctaattgagtgtggatttcaaagagtcttaaatggtagagggggcagatgtgtgatatttctacttggttagatacatacagccagacttcaaggaataagagaaacaaaagggagccatacccaagagataaatatagaatgtttgaacttgaagagctaagggcccgacatgagccacattcatgttggtatactgtcttttctgccatcatcttttttccttggttctctttttttgctggctcttttcatttctgtgcagaatgctctatttatccctttcttcttcttcttttgtttttttttttttgagacagagtctcgttctgtcgcccaggctggagtgcaggggcgcgatctcagctcactgcaagctccaccgcccgggttcacaccattctcctgcctcagcctcctgagtagctgggactacaggtgtctgccaccaagcctggctaattttttttttttttttgtataattttagtagagaaggggtttcaccgtgttagccaggatggtctcgatctcctgacatcgtgatctgccagcctcggcctcccaaagtgctgggattacaggcgtgagccaccacacccggcctatccctttcttcttggaggatagaaagaacagtcagaacttggtgtgtctcaaacaaaagttaggttgtgtttgcagaatgttacataagtcacagacttatttttataagccacagtctgaacataactttctggagacagaattcatgggctaggtatttttaggaagtggaattatgtctgcaggatttatagaaattcatagttaggactgtgaagttaactatgaagaagagtgacaggttttctcttttacaggacaaccccagcaatgtggagaagcctggggcttgccctggctctctgtctcctcccatcgggaggaacagagagccaggaccaaagctccttatgtaagcaacccccagcctggagcataagagatcaagatccaatgctaaactccaatggttcagtgactgtggttgctcttcttcaagccagctgatacctgtgcatactgcaggcatctaagtaagacagtctttctgtggcttaaaataccttaaggggaaggctattaaatacacacacgcatatagacataaaataaaagtgtaaataatgtattaagtcacacttttagaaaaactatgtgtttgcatagaacatattagaagagagaaactaggatgatacacaccaaaatgtttacagtgggtttcctagggttatggaaattttttcttctttttgtgcacctatattttataacttcctactaaatatgtattacttgtgtaatgaaaatgctctaaaatgtacttctgcaaatagaacagttacttcaatacaagaggcagagaagactgttttgtcagagtagaaagaacactaggcttgctatcaaagtcttgggttatttaacaaataaatataaaaaatatttgttgagttattcaccagatattcactgggtggaattctccttacagtcatccagtggtatctgtgcaggattggttccaggatccccctcatacaccaaaatccatggagctcaaatcctttatataaaatggcatgtataacctatgcatatactttcatatgctttaatcatctctagattacttataatacctaacacaatgtaaatgctatgtaaggaatttttatactgtatttagtgaataatgaatgacaagaaaaaaagtctacatgttcactactatagatgcagccatctttttttttccaaccattttttatctgtggttggttgaatccattctacctataagatacattcaaaatatatacacttcatcgtgctaatttgagaactaaaccaatgtttgtttaagcataaggttttaattaagcacaagttttaagtaattctaaaaatgaaagttttaaaatcttttacagcaatataaagaataggtgcagtatgggttagttaaaaataagaaggagagtttcacatagaaaattaaggaagagggagaaaaaccactaatcaaatcaaatgagattattcattttatgtatttcttcccaaatattttagattagaagacctgcgagtaaaactgaagaaagaaggatattctaatatttcttatattgttgttaatcatcaaggaatctcttctcgattaaaatacacacatcttaagaataaggtttcagagcatattcctgtttatcaacaagaagaaaaccaaacagatgtctggactcttttaaatggaagcaaagatgacttcctcatatatgataggtttgtacatacacacaaacacatcccaaatttaaaaataactgtttcgtatctatttatttacttcccatcacacataacaatcttctttactgttaaatacaatgccatatttcagtcttcatctcatataatctctctttaacatttagaagtaaaaatcactccttatttttgaaatactctcattttaaaaaatttctatgacactataccctgctggttttcctcatatccttcctcttctttctcctcctccacacttcctcctcttccacctcctgatttttcttcctcccacattcttccttggtttattctgtatgtgtttgtgttattcagggctatacagctttctgcctattcacactctgcacattttacctgagcaatctcatctatcccttgattacaattaaaacacatattaggatgatcccatatatacaaagctgaaacacaatgactgaactccagacgagtctacttcctagacatattcacaaacatcttaaatttaattattcaaatctgtattgattatcttctcctaaaacatgcttatactttcacttttgtgtgatttttatatacaacctattggaggcagatgcagccaaccactagggcatataatcctataattttcagaccctgcactcccagtcatcatccactattttgcaggacatcacaaaaaccatcaggtatggcagccttgctgccatccaccccttcacaaaactgtgtgacaggaatgtattacttactccttccaccacacttcccacctcagtcagtaatcaaattctatgggttcttaatcctgagtatatttatctcatatccgtaattattatctcaagttacttcctggtgaccactcctctagatttttccactaatctcttcacttgatttcttcttgttttgtatttaatagtaagtgatttaaaataatatatttgcttttgattattgccaaatagtttataaactctttattcacatttatttttttgaaatgactttgatttttgaaatgactttttaaaaagtaaggcatgtaaaagagttcaccattccaagaggaaaatacagaaaattgattatccccataaattggcatttcggttaaataaaaagaatgaccaatttgtatatcctgtacaattctaacctaattcttttgcaaatgaataaccatatcttctaattaattttaatctaaataataattttaaggctacatacctgaatttctgaactgtaaagtgagttaatcatttaagcatgatctgcacaaatctacttttgattctatgaacaaataaaacatttatattttgagggaatctcaattcatgcattatgccattataaacattcttagttggtgctttgttttttttgactctccggagtctggtgagccctacttggtcttacactaaatttttaaaaattcacatttcattcttttaggcctttaaacttctaatttttaggataacctaaaagtataaccctttgatagtcacataaaaccatatatactaggtaaaatgtaggcaagaagaacattttaaccccaccatttctgacaatgccacatgttctaatactttcattgtgctgaaattttcattgcattagatacatttttaaataaatgggctactggccaaggcttggagatgtttttgttatgtgatgatttcttgttgtgtcaaatttgtgctgccttagcagttatgacaagctcaagtgattttcagagcctaatttataagttagcggtttgggcactggtagaatttataagtcagtcacaaaattgtattttaccaagtcacagtgatgacatttttgatattatatagtgacatatctataacatttcaaaatactagtattagactaattatagtgttgctatgacctgacctggtgtgcagtacctgggagctcatttgtagctctcatccaaagaaatttagtaaaggcgtgaaagggtcttagttatgaccattaaacctataatacctatcccagactgtatttgagtaggatcgtgatacagaaaatattatagtgacattgtatttgtcctttttcttagatgtggccgtcttgtatatcatcttggtttgcctttttccttcctaactttcccatatgtagaagaagccattaagattgcttactgtgaaaagaaatgtggaaactgctctctcacggtatttttctgaattatttttctggggagaaaagaggaaatcttttaagagtttatcatgaaacacttatttagaaaactcaatgcttttgcaggtgtactaaaaataaataacaataatttttacaattaaacaaacatcctgtcatctaacctctactttatttatttatttattactattactattatttttgagacggagtctgtctctgtcgccgaggctggagtgcagtggcgcgatctcggctcactgcaagctccgcctcccgggttcacgccattctcctgcctcagtctcccgagtagctaggactacaggcgtccgccactactcccagctaattttttgtatttttagtagagacggggtttcactgtgttagccaggatggtctcgatctccagcccttgtgatacgcccgcctcggcctcccaaagtgctgggattacaggcgtgagccaccgcgcccggcctaacctctagtttaaaacatcttttgaagatcgatgttgctgcctttatctagaagagctttagaaattaaaaatcaatgtatcgtatttcagttaccaccaaatgacgttgcatgggcataagtgctcaaaaaatttagtcaacacaaaaaagcaatgttattgtagtaacctgaacatgttagcacaagaacataaaaatagcaaagcttacccacagcattacttggaatggaactggggccagaaactacttaatttattgaagatgcaaggctatcagatttttcctgaagcccttccactgcctgcccatctgcagtctgagtttacttcaaaatggagtaagttttctactcattactggtatttatttcctaacaaccatgaaaatatttcttctttgttatgagaagaactatatttaaatcttttttaaataaaaaaggcactcaaagaatttaatttgtattaactagacttgttttccttcataacaaaaaggaaaataattctaaacaatgttccattgagaagtcagattgggaaaatttgaacttaggtttaaaaacaattcacaattttatctgtaagttgtatttccttcagattttccccaggtctaaagaaagccgcctcaaatttttaacgaatttaattaattaatttagttgttaaggagtataagttacttactctagttatgtaattttcacattttaatctttataatgatcttttgagggttattttactatttttaaagatgaggagactgaggtaatggaagaaaatactaagagtaatgaaagaaaagtactaactcaacctatactaagcatttaataaatactaattataatgattcctcatattttgggattatttctgcatttctcatttgtgcaaatgcttgctagttataaatatacccagttatattgaaaaaggcagttaatagttaccacaatatgcttaaaatgtgtgaatcatctgtaaatacaaattacagatcagacactattagtatctgatatgccaaatccgattggagtttttctatttcattgtctcctagataccactgattatttgacatattatcttatgtagtatttaggaaaaaaaaatgctgctaattaaagtaggatacagtgagaaaccaccaccaacagtatggtacattctaattttagagatattaaaatctaaagaaatatgcatcacataatcagtaaaatatagtaattcgtttctgaaattagactactggcagggtgcggtggcccacgcctgtaatcccagcactttgggaggccgaggtggatgaatcacgaggtcaatagatcgagaccatcctggccaacatggtgaaaccccatctctactaaaaatacaaaaattagctgggcgtggtggcacgtgtctgcaatcccagctgcttgggaggctggggcaggagaatcacttgaacctaggaggcggaagttgcagtgagtcgaggtcgtgccactgcactccagcctggcgaaagagtgagactccgtcactaaataaataaataaatgaaagaaattagactactaccataggtatttgtgtttgtttaaaccttgaacactttgaacattacacagtatattttaaacatgtatcaaattctttataagtttgtaagcaaacattattagcttctaatgtagaagtaattcagaaataaccaaataaagtaccacttagtagttgtatgctaaaatttaatggaatttataaccttttaaaaccttcaaaacatcaaaagcatatcacttagtgagtctttgggttctaagttgattttgtaattttatttgcaaattagccttaggttgagatttactgttacatttctgtatctataggctttgagtctctgattagtaggtaccacaaaacagtaaagacttccagtaaattaaagaactaggatcatgcggaatggatattatggtcaatgggagtcgggcagtaatttgctattttcagctgacagccttatggtagggagacattagcaaagctttggtgaagttcaaaacatttcctggcataggatgaagtatgaaaaactaacacatttgagcagagtttattagcatttttgaattatcagagataatattagattacagtatcatatagtattagataagatgcaccgttgacacaggtacagaagtttccatatagttcaactgattttttatttattttttatttttttgagatagggtctgactctgtcacccaggctggagtgcagtggcaccatctgagctcactgcaacctccatcttgcaggctcaaacgatcctcccacctcagcctcacaagtagctgggactacaggcatctgacaccacacccagctaatttttgtatattttgcagagacaggatctcgccatgttgcccaggctggtctccgactcctgagcccaagtaatctgcccccctcggccacccaaagtggtgggattacaggcatgagccaccatgctcggcccagatcaactgaatttaggatttgatattactttgactttcctgcaatccaagttccttttgccagtttacttcatttgcttctgcaaatataagtacagtggtttggctttctttttaagcctttaataaaatgtctaggtgttgagactaacatcagactctttctcattaatataatacaaagccagctcgattctaattaactagttggaatttcacatgttagctctacaaatcatttttcacgcattattcctatctctataagcttgttaaaaagtgatttataaatttgttccagactctcaaagatgaagacttttgtaaacgtgtatctttggctactgtggataaaacagttgaaactccatcgcctcattaccatcatgagcatcatcacaatcatggacatcagcaccttggcagcagtgagctttcagagaatcagcaaccaggagcaccaaatgctcctactcatcctgctcctccaggccttcatcaccaccataagcacaagggtcagcataggcagggtcacccagagaaccgagatatgccagcaagtgaagatttacaagatttacaaaagaagctctgtcgaaagagatgtataaatcaattactctgtaaattgcccacagattcagagttggctcctaggagctgatgctgccattgtcgacatctgatatttgaaaaaacagggtctgcaatcacctgacagtgtaaagaaaacctcccatctttatgtagctgacagggacttcgggcagaggagaacataactgaatcttgtcagtgacgtttgcctccagctgcctgacaaataagtcagcagcttatacccacagaagccagtgccagttgacgctgaaagaatcaggcaaaaaagtgagaatgaccttcaaactaaatatttaaaataggacatactccccaatttagtctagacacaatttcatttccagcatttttataaactaccaaattagtgaaccaaaaatagaaattagatttgtgcaaacatggagaaatctactgaattggcttccagattttaaattttatgtcatagaaatattgactcaaaccatattttttatgatggagcaactgaaaggtgattgcagcttttggttaatatgtctttttttttctttttccagtgttctatttgctttaatgagaatagaaacgtaaactatgacctaggggtttctgttggataattagcagtttagaatggaggaagaacaacaaagacatgctttccatttttttctttacttatctctcaaaacaatattactttgtcttttcaatcttctacttttaactaataaaataagtggattttgtattttaagatccagaaatacttaacacgtgaatattttgctaaaaaagcatatataactattttaaatatccatttatcttttgtatatctaagactcatcctgatttttactatcacacatgaataaagcctttgtatctttctttctctaatgttgtatcatactcttctaaaacttgagtggctgtcttaaaagatataaggggaaagataatattgtctgtctctatattgcttagtaagtatttccatagtcaatgatggtttaataggtaaaccaaaccctataaacctgacctcctttatggttaatactattaagcaagaatgcagtacagaattggatacagtacggatttgtccaaataaattcaataaaaaccttaaagctga

SEQ ID NO: 406 - DNA, 258573 bp, Homo sapiens
gagttactcttgcatttggcaattaaagatgatgtttccatggaaacagttgatcctgctttcattcattggctgcttaggaggtaaaaaaaaatcctatattttctaagttgaggttagaagtatactcgagtcatatgcttacataatttttagatgttgaaataaaactccaccagtagcaaagaaaaacaaatgtttttcctcccaaaaggaaaatttaaattctctaatctgataattgggttcttattccttcccttatttttgtaagccatttttatttccatagcaaatataatgacatctgatattacagatctactgtaatattatgctttggtattatgaatataacatcaaatttgagcatgttaatttgtgacattttttttccaaaggaacttaaagaggtgagatctcacatacaaaggagcatataaatttaaaaagtgctggtattttcatatgttttacttttagcaaataacttatctaaaggaccaaaactgaatatagatacaattttattttttaattttggaaaatttgaaatttagaataaagtagaaagaaaaaatgaaaaaaaattatcgtctttgacacatacaaaagcaactattacaaatcatttgttgtattttcttttgttaattttattttattttctggagaaataagtaagtgaagagtttttttaaaatagtgtatatataactaactttttgtttattttattttgttttccctctttttatgatattctcaagcaccaaaaaagctgaaacaataatacaatgaatgaatacatctgtaggtattattgagatgtagctattgtaccattttactgtatttcttctgtatatatgtgtgtgaatgtgtgctttttccttttttttttatctgtctacttattttggctaacccatttgaaagtaagtcataaaaagcattactcctaaaatttaatactcatctccttagaagaccacttttctacataaacataatttcttcatgatacctgaggaacctaagaaaaaagtagcttgagacttttctaaaagaagaaaatgagtgcggaatgaggccaaatggagtagtcaggtaaaacacatgttatttaaagacatgaatagattggaatagacttttaggctcttatgtcaaagttcaaacatgcttcaaatatttacatgataatatatagcaaaaatccataatcaataatagttacagattaaaatctttaacttttaaaagaaagaggttttttgtagtttttacagatttttactgtgatgcctcaattttgttcctaaaacattttcattgactgctactcatcaagtactgaggacaaaaagaatagttgtttaaaaatttctgactttcaaatgggctttggaaaaagttcaatatggtaaaatattttattcttggagtcttttcttcatttataaagtttcaaatataatctctgttttaggaaaaggagcaaaagtgacacaaaatgtactgcagcagtattactgtttatgatatgaaattttgtaaaagcaatgttgaaattttccaaatagttgaggagacattcacagaaagacatactcagaaagaggaagacatgtttagaaagtagaaaggcagcaaaagaaaatgagatcagcttttaaaaggtttcacatttttagttgtaattttacattatgtgaaatttgtattgtgtttcagcatttttgagaaatgttttacatatttacgaacaaatatatagaaaaagcagtgtccactttagtaagatgtgaagacatcataaagaatttaaaggtcaacttattctctagatatggtggtaaaacgttataaggatttgtaagggagaattggattaatttacatgtgacaaattatatgtaattatatatatttgcacatatatgtagatatgtttccatgtgtgtgtaattatacatgcaaatatatgtaatgtatggacccctgaactttatattttcctctttagggaattagaaaggcagtggaggcctatgtccatataaatatacacttaagcctattataattgagactacagatcatactatatgagagaatttagattaccttcatgaaattattttttaaaaattatcaatactatagtgaaggataaaagacatggtcaccaaacaggaacaatggcttactttagtattgtagatttagtcatggacaacatatgcccacaaaattcacatatttgggctgcttgttttcacagtgatagttgcagtgtatgcaaatacagcctaagactgctgacacacatcttcaaatgctttcaatcatagcattcttccattctatgtcatgcaaatgtgaatgaatttctgtactagtcttcccttaatagtgattaaggaatgctttgaaagcaaaataaacttttcaagttcttcctgaaatgattgaggagtattttccatttggtgggtttaataacaccactcttaaaatcactgagaaaatgatcaagaatgcctctggactgcagttaatctcaaagcagatttggaactttgtgagtttgtggtgttggatgtggcacttcgagtaagcaattgccataaactcaagtggctgtcatttcttctgtagtatttgtacacagtgtaatatgatttgatagcattgatactggtggaatggagatgtcactgatccctgcatataaatcttgacatcctccatgtttttacagaaaaacttatttcaaatcatcccctctattgcagcagactaaatcttgaattgcttttcatttataccatttaaatcttgacagtttatcagagtacgcatgtgagaatcagtaaaagatgcagacactgttggtgtattttgttcttataaccttgatcattgattactccgcatattggatattttgtaagctgcatggtgactaagaaggcatgtggggaacttaaaaaatatattgcaagtgctattagagttcaacaaacatttaaggttaaatacaacccacaattttattttgttcttaaaatagcagtctcaaaagtatctgttggttagttaactgactcctgcaaataaagtgctcactcaaatgaatttaattgactgttgcctaagtgttaagctgtcttaaagtactcatcacataaaagtgtttttaaatacccctgagtaggaagtctgttgaaagcaaaagaatggaagctggtatattcacaaggggtgggtatcattgcaggagatcaggatagggaggtgtttgcctggtgacagcaacagaggagaaggtttaaggatgaagtatggagaattaaatgaaaggggcaggctggaacctagggtgaagtgggagagcttacaaaagattgaacagagatgtggaaggatctctagtgcagcaggatgtcatggaaattgaggaagcagttcaggaaaagggagaggtggaagaagaggatgtctgaggaaaagccactgaggcttgtgagtaggaagccttgaattactggaatgtagggctttaaggggggaagaaaatacattgaggtccgtaatactttgataaaactgaattatacttactgacatgtacacatgtatacagttgaccctagcacaatatgggtgttagtgttactgaacggacagttcagtaaatgaaccgtttgctttcctggtgcagtaaagccaaacatccacaccaaggctttgcagtgggagaaaggagagtgtttatttgcaggcagccaagcaaggagaattggtcagctcacacttaagacctgatctcctcagtggcttataagcaagagtttttaaaggtagtgataagtttcagaaaagcagaagttaaaggccagatcgtaagtcagcacatgcaggttatacattggtttggcctaaaaaggtgggtatcttgaagcaagaggagagggaggttacaggtccctctcctagatggattctggctctctaatttgagtttggttaagaaagtgaagctttgtctaaaaacttggagtcaggagaaaggactgttaaggtctggcctgtgggcatgacttcctctggggccctcaggaagaaatttagaagcaggaactgtggccagggttcagtcctcatttcccccttatctgaggtctataggccagaggttccatttggtaaaggtcccttttactgaaaaacagctcagggatatatattaacatgttgtctttagtttctagaggagccagacatcttgtgactccaacttccttggatattgttttaagctattactatgttcttacttaccaagttgctcatttacttatcagggctagctcagcgcctggaatttccgttgaaggaactcaagatttttctttacttctatgcttgggaaggcctggcaggcccctaagaaggatctctgccccatctcaataggtgtgttgaccatccccccaagtatgaaaatctatgtataacttttaactcccccaaaacttaactgttatacttagagcctactgttgaccagaagtcttaccaataaaatagtcaattaacacatatttggtatgttatgtgtattatattctgtattcttacagtaaagtaagctagaaaaaagacaatgttattaagaaaattataaggaagagaaaatgtagttactattcattaagtggaagtggatcatcctaaaggtcttcatcctcattgtcttcacattgagtagactggggaggaagaagaagaaggggggttgctcttgctgtctcagtggtggcagaggcaaaagaaaatccatgcaaatgtggacttgtgcaattcaaagctgtgtagttcagaagtcaactgtatttacatgcatatctgtgtgcattccaggcctgcccatgttgtagatggcacagtgagatctagagcatttcaggtacttgttcaaagtcacatagcttgttattgactcagtagagctttttctagactgcctgaattttcatctagggggttttcagctgcactaagcctttcatctgtatggtgtgttgtacattcttctacagaaaagaaccaagtggttcctccttggtggtgggtaagagagactgttgatacttatcagcgattgggagatagatgtgtgtgtgcacaaagacctgggtgtgcactgagaggagttgaggagagttgtcttttgaaaatatctctgaagattttcaactaataagtgttctcaaggtgaaaagccttaagtgaatggtcaaacgctgaacttcccaggaaggttgggttgctgaaaggaaaatgatttctttcagatagagctgcttctaagtcaaacaaaacttgagggttcattgagatcaactggctaggaatttccttgacatgccaactggcttagtgaatcagaatttcattcacagtgtagatatttgatatgttcaagccctggctgctatgttgacctaccttgtttttccctcttgaagactgtacactgctctttcggaatgaatagtgaacacatactaatggtttcttgcgtcaaataattcttgctgatttatttcacccactactgagtatttgggagactgggtccttaaacaggatgtgtatttcctttatagtatgtgtatgccatcttgccaataatgatatgagtttgatggtatgaaaatgctcaccagtgtggaaagaggccatttcctcatgattatcagttgccagtcattgtcttgaagcttgcatacaagtaatgaccactatcacttgaccatcttcagaggtgggccctgtgtgaggtattttacatatgtttttctgtaattctcatttcaactgtgcagtgtctatctcccacatactttctatgttctgtttcctctgagttttaaaaattttctttttgcttgatataacattcagactctatggagtgaaaaatcctgtggggtatcccttgagggtcccttcctctattaactagaggacttttccagtgtttattcttttcaaacttcccacatacccaactccctccccacatccagaaattcaaagcttgaacataagaaaatattcatttctaaggaccatttctacattctgtattacttttgaggcacaattctaactcgaaaaatggttgcatattttaatttgagaactggcagagctcactgctcttgttttgttaggcctaagttgctgtgtgttttctcttttcccacagataggtatgtaaaacaatttattttcacttctctgcattttgcttcctttgaatatcaaccaatactaagtctgagacaatgcatagtgaaagaactctgtggttacaaatctaacactggatactattttaaatagagatattttgcatttaaaattattttgcaagaactatatgcagtagagaaaaatcaagttacacatgcatccctacatatataagcatctggttgtgtaattggatgaaactatgggagaagatagagtcattttatcttttatggtattattcttatcattttaaagcagtgtcacgttaatgaacaacttttagaagttatttgccaactgtggtagggaaaagtatagcccagatattttcctaaggtggctgattgtgtaatggttgccagttttttcatttgccctaagaccaactaataatggctacaaaaacatcatattaatttctttgaagaatgtacagtgaaatggcaaatgacttctagaaatggagagattgttagaatttatttctctatcagtagataaatacataaatgaagattattcaacatcctttttattgattccttggtctgtcaaattgttgacaattattggagcatattatcactaccattgcattacaaattcagttgtccaattttgtatcattgtgatctcactatgcacatgtgatttcatgttagacggttaaggctgaaatattggtgaatatgacatctttcctcaatgttctattagttttgaaaaaataacactttattaaatattaaacactgatttttggttatactacattgttgatatttatcacttgaaaagaaggaaaataataaacctgatgttgaccaaaaaaaaaaaagtcaaaaaaattctgtacccctagctggccattagacttcccaatgtgtttccaacttctgcttggcaactaaggaagtaagcaagtcttggcatttgacttattactttctctttataccatctgggcttactttatttataggactaggggtgacaaaagtaatattcctacctgtcactttaataggaggcaatttattcctcttaactacaaggacagttcaaaacaaactttttgcacaggctgacctgggcctcagctagtggtgagtgccctcgtgaaactatatctttttaggaagctgctctttttttttttttggactgctcggacagccattgaagatccagcccttatttgtggaagctcttgagggctagttatgggggtgtgaaatggtgtgttaacacatgaaaccatattccctgaactttgtgactgtttggtttctttatctggacagctttctagtgtctgctgacctgagagagtggaatatgtaggctgccattttataaatggctctggttagttactcattgtttattctaaccatgtgtacattatttgctcctccaatcttataagcagggaggttgtggtgaaagctgctattggctgaacttaaggcatcaggcaactctgggatcagttgctgccattgtgacattgattggtgtcacttgtggacatggaagcactggtacgattaaagttttagtccaaaagcacgtgaatcctgggaatagtcttttccttttttactttgttcatggcaacatcattcattctgtcttgttctgaaaacttttttgatttaaagggcagtctgagtatgtcacccagtaagtaaagggagatggcaacatttgtgtgtttttacgttagccttaagctttagagctcctagattttgtctccaaataagtttttcattattaaatttttagtggatattaaaataccttgcatgacttcttcactctatggcaaaatagaacttttcattcttatcccatgagtgtgtgtgagcaaatgtctgcacacttgcaagcgatatttaagctcagacatatgtacaaaacgagagaagtggtattaagtggagcataattatgtagataattatgaagcattgactgttgaacagtgtactgtgtgggtttctgagtgaacatctattttttcattaaggaataattttactgcagtatatacaaggccacaaatgacatgtttctttctttctttttttttttttttttttttttgcttgattatgcagccaaacaaatgagaatactcagtgctatggccattatttctattataggagaaaataaataacagtataaaagaatctaatgttttttttctgcctcatggggtttttgaaagctctttgctgcttattttgttgagtttcccattgatattgctttggtgagtaattatttgaagaaggggtagaaagtaaatacttgctggagaattgtctctcaatgagaactgatccagtgggcattatactgattcccccttttccccctctttttgaagttactaccttccacagattaataggaaccttttgtctcagacttaatacttgcatttatttgctcaaaccagataactgaacacaggtaccagtattcacaactaccatgaagataacgacaattccatcctatttttcaggccatgtatataggaggctatagtgaataaaatcccatagtagactgcttcccataaattatgattcctcagtcagaggtaattaaaagtttgatgcaatgctaagtaaacaatatgcaataataatatcaaataacatttattgcattgccactgctgcaatgaaaaaatactgcttatctttgcatcaaaaatcctatattatagatatcattcccatataacagtagagaattcagtggctcagagagcttaaatgacttgcctaaagctaaatggaatattaatgggaaaaaaaatcatgtttattgtggtccagagtcactgttcctcctagtagacatgatctttcctaaagctggggtcagcagaatttttcataacatgcgctagatagtaaatattctcagctttgtgggccatgtagtctctgtcataactactcaactctgcccttgtaatgtgtaaaacagctatagacaatatataaacaagtcagtgtggctgtgttccaataacattttatttatggacattaaaattcaaattttatataattttcacgttatgaaatgttcctttgtttgtttttagagacaggggtctcacttcatcacccaagctgaagtgtagtggtaagatcatagttcactataaccttgaacacctgggcccagcaatcccctggcttcagccctcccaagtagctgggactacaggcacaccaccacgccaggctaatttatttatttatttatcttacttcttgtagagatgtgttgaattgaatttctgataaagtggtattatacttagatgtaccttcaagactttatgccttgaaggataaagggcaaaaatattccaggaggaagaatgacataaatcaatccaagatatgttatttgataaatcaacttattttgcaagtaattatatgtgaatttcttgctgacatccatggatgtcttactccctgtagggctgtagtctatgaatatggaaattgtgctctgtcaatatggaactgctgaattgaagattgctagacctttgattttttgtttgtaagaaggtgaaatttgactttaggcctaaatctctggatttttttttaaatgaagccattcaatttaaaggaagtgttttctcccctcctgaaattctttgatccaaatttaagaagtgttcaagatagatttggcccaatagccaccatcgtgcagctctgcaaacctaaattcccagtatctatgataggtcatatacgtatcatatgattgtagaatttgtgatttgcaaaaacttgaaaaaaacaaactagcccaggttctatctgaaaagcagacccaaagctcaaactgagattaagggaccgagatgtggaatgtgtccaggcagccagcaggtgactgatttgaatcctaactttggaagatttagattaaagtaagaattgcttgttgattacttgttaactaaattcatagcttgcataaatgatttctcatagatttggggatattttgccaaaagatacattccgtaggaatagtaaggcctttgcaaatgctgacccttcctgaaggtaactttaaccacagtaaacattcttagagatttgagtaagtgaaacaccaagcagaactcagcatttttgttttgttttgttttaatgtcttaggcagctgttactttcaaacaagtcattaaaatgcagaaaagggactttagttcagcactctgaggtttgcaaaagattactgttagggtgctattgctgttgaaagtgctatttttgtatgtactttcgtgaagctagtcctgtcttgtacctgtactgatggtactcagaagggtgtgcacggggtgtagatgatcaagaatctgcaaactgcctaacagaaataactgcctctgtaaggacacagtgaagatgtttcatgagagtcatagacacattcactgaattcgcttccgttatatgttcatatttttatataatatattgtgttatagttggatgcataaattacagttggagttaagtgaatctgattagggtggtctcaggaaagtctgaagtctttctgtgatcagctgtaacattttgtaaattaaaaccatctgcaatgatgcttaagtaaacacacctacagacccagggagattcccagacaattgctaatttactaagttttcatatatatatatatgaaaacttatatatatgtatatatatgtatataaaataggtatgctaagaggttagaagaagtgtgtgttaaatatggtcactatcttctgaaagtataaagcccggggatgagggtgataagagtgaaaaacaagtacatgtaatatattataggataatgatgttgtgatgagtaaaatacacaaacattgttctaggaattcagaatgaggaacgattactacaagggagataatgagggaggatgaatgaaagaattgagagcagagtttcctcagacttccttacacaatttggtggcttctcatacatactgccaaatgcttcttccaaaacggtggtaccaaaaaagtatagagagattccggtttaactcatcctctccagccctgtgggttacttatttataatctgtgccattattaaggaaagcaataggaattaaaaggaagccgggcacagtggctcatgcctgtaacccagcactttgggaagccaaggtgggtggatcacgaggtcaggagtttgagaccagcctggccaacatggcgaaaccccgtctctactaaaaatacaaaaattagttgggcatgatggcgtgtgcccgtaatcccagatactcaggaggctgaggcaggagaattgcttgaactcgggatgtggaggttgcatcactgcactccagcctgggcaacagagcgagaccccatgtcaaaaaaaaaaaaaaaaaagaaaggaaaggagcaccacttttttattcagagtgcttaatagtcacttagaattaggtgatttagcaaatgcaaagtgtgtaatactgggcctagcatcccatgtttattttccctccacaggttgacattttagaatgtgcatgtgtttattaactaagaatatataatgaagagggattttgttccatactgtatagctctaagaaacaatgcttctgaaaacaaaataaaatatgtttttgtttgccaacatttttggcaatacacagtatttctcttctccctgaggctacagaggtagcagttcagtagatttgaggagggctctcttgtctttactgtatcttgggcccagtgatactctttcaatttttaagatgcttatactttttcttacattgccaaggttggtttcattcctaagaaaaggaaatgaaagaaatatcttgcagttgtcacccattccctcctaaaataatctggggcactggtggcaggagagaaggtttctagaccaaagcttatcaaattggggataagaacccattgatgttgtgatgatatgaacatagtagtagtttatgtctagcatttttaaaagtaggataaagcacatcagatggaatagaatagagtagaatagaatataaaggaaaaaagttaacagtccagcatgcagtaaggattaatattatttgaagaaatctttttatcagttgtatgtttactttatcagttgtatgtttatcagttgtatgcttactgtgtctacaattaatcatgatgataattacatttttaattgtgaatcaattaaaaataagtttaacaaatgtaagcctaggcaactctaagacataccccaatctccgcaccccatagttccagatgcattttggggaaagttgttgtaatagtccattttcatactgctattaagaactgccagagactggtaatttataaagagaagaggcctaattgaatcacatggctgaggaggcctcaggaaacttacaatcatggcagaaggcaaagaagcagcaaggcatttcttcacacggtgtcaggaaggagaagagccgagcaaagggagaagagtctcttataaaaccttcagatctcatgagaactcactcactatcactagaacagcatggggaaactgtccgcataattcagttacctcaacacatggggattatggggattacaattcaagatgagatttgggtggagacacaaagcctactcatatcagttatcctttctgttctgcttccttagaccttcatatcttaccccacaacccaactcaatccctctcagtagtctggaagtataaaatcaggatcctcacttaagaaaagaaacagggaggccaggcgcggtggctcatgcctataatcctagcactttgggaggccgaggcgaatggattgcctgagctcaggagtttgagaccagcctgggcaacacagggaaacccagtctctactaaaatacagaaagttagccgggtgtggcagctggcacctataatcccagctactcaggaggctgaggcagaagaattgctagaagccgggaggcagaggttgcagtgagtcaagattgggccactgcactgcagcctgcgtgacagaacaagactctttcttaaaaaaaaaaaaaaaaaaaaaaagaaagaaagaaagaaaagaaaaagaaacagggagggagaagtagatggtgtttatacactcagacatttacaaacacagtgctggcttctgcttactatggtgggggcagtaatagagtatgctcttttctactttatgagattacagctgtaaaatactacaaaatacaatcactaagtcgtattagttcttttttttttttttcttagagatggggtctcactctgttgcccaggctggagtgcagtggtgtgttcatggctcactgcagttgcaaactcctgggcccaagtgatcctcccatctcagcctcttgagtaactgggactataggcatgcactactgcgccccactaattgttatttatttatagagatggagtcttgctatgtttcccaggcttgtcttgaactcttggcttcctatgatcctcctgccttggcctcccaaagtgctgtgattatagatgtgagccagcacaccaggcctagtattagttcttaatagcttctccattacaactaatttacaaaaggaattcttcattggataattatttgctcatagaaacagtgaccttgaactagtttgatatgaaacattctttctaagatacataaagggaattgtgtctggtcctaactggccttgacctgaaccctttgttaaagaatagaaactgttagaaataatgggttccataatagaaatgaaatcatctctattaaaacctttgaaagtaatgtgttaaagaaatattttaaaaagagttgattaatgcactcttttcatgtggtgagtgagaaccttgtgaatttgcacatttcaaaaatgtacaataagtataatagaaagagggaatgtaagtgttgtttttttttttttttcagataaatggaccattgactgtgttctcctggtgtattgtacacattgcatattgcatccaacaatggcattctaacttttttttttaatcatgtggggttgctattaagctgtctagcaagaaaggtataattatgttctgagaattatagaaggatgtcatggaggttcaaaaacattaaagctcacattcataaaaagaaaatagcatgaatttaaatacagaaagctatgaagtactttgaaaacattttaatctcccaagactccaacccatctcctcccaccctgtttttctgccaaaaacattatgtcctgcgctataactataaattaaccctttcattcaactataaagaacatttcaacaagcaaaaatatagccattggagttaaacagtatcaacataaaacactgggcacttttagaagtactctcaagtcctcttcttttatggaattatagtacagactaatgttaatcagtccagtgaaatagatcatacctttaaatcaaactctgcgattaatttatgaaagcaaagtgccaaaatcaagatacttaaccttaaacacaaaccattttgtacatatatttttatatgtgtggacatttttgtgtttccttaggcaggttgcaattagaggatgaatgcaattcctggtaaaatctccatgctttgaaagggctctgccattcctgcgagcagtattattttacttgaacatttatttctaggtcctgtgaagcttaaccagtccctctcagttccaattccctaattattgaatgccacttcccatgcaatgagaaaaatcatgtagtgaactattaatttctcaatttaaagggttttcatcacttttattggtgttattttgctatcatactccagctgcatgctatactctagcactttttcttttaacttaattgcttgctaacatttccagatgtggaaaacagacacattagttattcctaataagtattttattttcctttctgatctgaagtgtattatattacctttttctttttttctagagcattggttacagtatagcttttagctgcaggtgacaaaatgcattagaggtttatttttccaacacatgatgtttggaattatgtggttcatgttggttcaggaactcaaagatgtgagagctctgggttgccttttctgtaacatattgtgtgtatgtgtggtgtgtgtgtgtgtgtgtgtgtatttatgcacatatataaatatatattttatacacacacacacacacacacacacgtatagtgttctccctcatggtgtccacttggtcgcagtagttcccagcattctttcctcatatgaaaatttccatatcaaaaaggaagcaaagcaaggtcagcattttatttacttcaaaacaaaatcagagtagagacttttatctagaagttcttagcaggttaacccattgttaaaggttgaatcgtgctgctaccccaccctcatccccaattcacatgttggagtcttgaactccagtaccctattatttgaaaatagggtcattgctaatgtcattagttaagatgaggtcattagtgtgggccctcatccattatgactggtgcccatatgaaaaaaggggaaatttggacacagagacacacataaagggaagatgatatgaagagagatacagggagaagatagccatctacaagccaagcagagaggtctggaacagatccttctctcacaaccctcagaagaaatcaaccctgctaacaccttgatacagactttcagccccctgaactgtgagacaaaaaattctgttttggaagccacccagtctgtggtactttgttatagcaaccctagaaaatgaatacaccctcttgggcttttagtggtctcataagccaatctcccctggctacccttcttcccagccgagaatgacaaagagttgtggaaagtatctctggagctttcagtctccacagtgaaaggctgactctaagggctggaaagaagggccggtgatagctattgagtggactaccagcagcatctgccacagccagtttttcacatgtggcacatgtctggcattcagatatttgttaaagaaatgaaatattctaagatcgaatactttgtcttcctctgacattggaagcatataaatggaattttattttggtcttgtttctttggcattttccagctttaaactaccattgccaaaatagaagatatctcatttctaaaaaaagtttccatcttttaaaagttttttcctaaagaatagtgggacctagaatatagatcttatttcattggcggcatatgattttactttctttgacccaggctagagctcattctgtttgggattgatgccttgtaagtgcacggaatattcctttctaaatttatgtcctcttacattctgtctttaattgcattgcctacccttacaccctgttgtgatttaccctgtgttttgaaatgcactgctagtttttgttttccatgtagatatgacataaatcagtaaggaaaaacagtatgtgctttcctgttccctaggaatttcagataccatcattgtcttttaggaatctcatttcttttagtagagtgatgcagcttgcccagaatcccttgtctatgttttctttgtcagtcttcataaaaattgtatagagtatgaccattagaattgatcgtctgcggtttgatcttttacatgacattaccttaggagctcataaagcttgtacttacattcaaaggcagttattccttgttgcctgtaggtgttaggggggaaaaataacaccttaggattggatttttggacttattagtcctgttcggaagtctgatatgccccttattttaggatgtacatttaaaatggagctttggaaccaggctagcatgtcaaaaaaatgcccctgtcacaaaaagtaaagtttagcgtcaatccgaatgttacgttgaatccattagttaggcaaaaggcccccttctgttttcagacagggtgctttttactggttatgaatagctgtgtgaatagtcaaggctctgtctttttgaggatcaaaattcattttgaagaaaatgttggataatttcttttagattagcagagacttcagaatctcttccttttaagtttatattgctggcaagagactagaacatgaaacccagcatctctcatcacctatttcattcccgtgaagcaagattgagaggccttgtctcttttctgagtatgaagcatgcactgacctgtcacgtttgattattattttgtacttactttttaagaggcgtcagaggctcccaaatggctgctgatggcctgaaagcctttaggagccttaaatttcagagatggcagatatgtgcctcataggccattaactccagcgccatcaggaaatactgaagttgaaaaagcaggctgttggttaattttcacctctgaccatattgagaacagtgtggcttcatggaaagggaaacaaaccaagaatatgaggactagggttgatatcaggtctttcaccaagaaactctgttactatggtcaggtcatttaacctttctaggcctcacttctggggaggccaaaccacgtgcaaggtgagaagatgagctctgaaattaaaatcttagctttatcaatcactagctgtaaaatagtatctgcctcatatagagttattatgaggattgtttcattcatcttattcattctacagacagatattgaatatctactgtgttctaagagctgagtatacagcaatgaattcgatacaaataaataacaaacacatgcataaacatgcgtagtgtttatgtagaaagatctcgtaaggttgtgagatgtgctttgatatctgtgactggtggaaatgaagggtgtataatgactttggatgagggagaatgcggatggtcacatttaagctgagaaggtgacatttatgctaaattctgaatgacaaaaagaaaccagaacacaaggagaacaaatgtgtcagcccagaagtgacacgaagctcagcgtgtctgagaagcaggaacaagagcagtgtggctggacctcagagatcaggagctggggtcaggggagattgaaataggagaagcaaaggatgtaaatagctgcttagtgtgcctggcacatagttcatggtgcctggttcaataaatgttagcaaattagtagttattatccttctctcaaaaggatctcagaagaaaatgctcctagtagtttaacatttttatttaaaattaatagtgacctctggagaagccatgtagcatcgtttgggacatgacttttattagataatgataggatgggcatttgagtttttattgtgaccacttagaggaaattttttgaacacctctctttgcctttttcgtttaaaccactgctttcttatctctactaacctttcttcttttggtttatctccccaactttcctgttatttccaaatttataccattatgttaatgcattattgctttcaagctgtacaaacatcagaatttgtcagaaaaaaatgatgctatcccatctcataaataatgaaatatatgttatcagaagtaaatcagaagctattacactagaaaaatgttaggaaatgttcactatatttacaaatatttgtaaaaagacatcacaaatattttcgactttctaggacaataaattcaattaatagaacagaatggcatttttgtttttacttattatttctattcagtgaattggttgaggggcaaaaatgaagaaaatagcaatattgcctcttttaaattaggagtgttagtagcaattttaaaatccatttcttctggaagttgctctttcctaaaaagggaaacggaagctttttttttttcctttggcaatttcccctgatagatgaaagtaatgatcaggtaaagatcagagactaagggggatagcaagctgctttctcaaaggatggtggggattagtaagggctaattgtgtggtgatgtcgtggtgcaaagttgccccgagtcagctgagctgtgagcttgcccttacttctaacagtctttgagtttaagaagtttctaaactatcctcatttttgataatttgctaaaaggacttacaaacgttgctgaaaactgttatactcacagttatgttatttacagggaaaggatccatactaaaatcagctagaggaagacacacatggggcagagtctggaaggtttcaaacgcacagcttttattgaccacaggacatctgacccttccggtatcgatgtgtgacaatactcaaggagtatgatagccaaccaggaactcgttgagcctccgtgtctagagttatttattgagaccttattatgtaggtgtgactgactggttgcacatgtggttgagctcagtctccacgtcatttgataccacgtgacccaaatttctcacccttaatcacatggttagtctgtctgatgtggccagtttccaaggcaagactattgggtgtggctggccccaccctaagatctagtgtggccagtccccatcctaaacagacatttcaatcagctatggcacagatttcctcctggaagctgagggcaaagatcagacctagggtaaggccaaattccttacataaagagtgagagagtatccctgcacggactgtggaatccattattctagaatatgtgttttacattctgcaatgctgtgtgaacttgctcatgccgcctaaccactcttaggcacagcatttgtcttctgttgggaataattatggcatttacctcacagaatattctgaggattaatgaacacatttgggcatgcagaatttactttagaatttcagctttagcagctgctatttttatcatttcaatgattattttaatcatattgttactttattgttgttacacttatgataaatatttttattaatgtaaactgctattcgaagtagccaaaatgccagttcattgttttagggccttttttgctgcttcttgatctcgttttctttgtctgacttttcacggattctttgtctcttagtctgtttattcattctctgagttaatagaaactcctctgtaattttgctgagcattccaagcaaaataggaaagtaaagagcttttttttttttttgggcgaatttgtttgttttcagaaatgctatggcaaagattatacaactgcagtcccataagcatttggtggtggcattatcttgttcttttttaaacacgtagtacaatagagagatttgtttttttttctctatgtggaaattctcctcagagcatgttcaagttctcttagccaaagtagaaacatctttaaaaagacgcctgttcagtgctgtatctttctcttcaatttgctagtaataaaatggacatcccaccaaaatattgagtgtttttattccaactagaaaaataacattatcaagcttaaggtttgcatgccaagccgattttatgaaaatactcaggtgttgaattcattttgaattcagctttagtttggcaaaaaggctatgacaagaaagacttggtgtaatagtttattcaccaatctacacttagatgtagtttgttgtaataaaaagtaattgctgcggtatgaaatgatcttaatatggcaatatttttcataccaacgttagttctcatagaggtggtactatgctgttgagtgggttaattgatttcctttaacaaaacaatgtctacagagcattttgctttgtatgcaaatggagcagtactagaatttttagttccttgttttcttcaatactggaatgtaactttttacaatgccttttactgattattattttttggatgtctcccacccatataggtgagcttctcttacaaggccctgtatttatcaaagaacccagcaacagcattttccctgttggttcagaagataaaaaaataactttgcattgtgaagcaagaggcaatccatcacctcattacaggtacagtgaaaagtttgaaaattcaaataaaaaaaactaaacacacttatgtggtgattgtgaatttttttttgcttcaatatatttatgccatcagtaagaaaaaaatacgtgaagctatagttgtatgatatattcaacagatttaatatatgaagatttaaatctatatgtagcatatacttgattaattattgatcatggcagaatccctaaagtaaataatgtcttttcattgatgtatagtgcagtttaatttataaacttggatttacatgtacttgtcaagaacacattcattgtggggatgaaattgtgttttaaagttaatttgaaatcatagttaaacaaatacttctgtgtgccaccttttgtccgtttaccattttactggatatgtgcttggaggttcaataagtaaggaagaataaaatgtattcttaccaaagtcattttaatgatttttgaagagaaaacgtatttcatttgttagatgtatatcaagttaaagtctatatttttaagattatataaacaattgctcttcactgaaaactttcaaatatcatgcaaagtataaggaaaaaagaaaaaaaaatccatactcccaccaccttaagaaaaaaatattgatattttggggatgatgatggattatttggatcagatgggtatttgtattattaaataacccaggattaatcatttttactcttaggagtgcttgggagacccactttcatgaagagatgaattatttataaattacatgctgcattcttataagtggttgaaagaaagtattcaagacacctttaaaacaacacgctctttcatgcaatgtgaacatctactatgaaaaccccattcacactattagttttcttgacaaaaccttttctataatctgcagaacaagcaaacttcagccagtattaataaaattttaaatgtttagagttgtaatttagatcttattgagcctctattgttctcttaaactatataaataattgaagccaatagtcattggtaaactgggtcaagattggggtagaaggtaggttttgtatttttgcatctggaagtaatcaagatcagtctctttcaacaatatttaacaacatatttattggggccctattgtgtacttcaacaaaataagcattataattccaggttactgattagagttggcaaagatgagaaaaagtttttctctgcctctacctctttctatagaaataagaaagttatttaataaaatcatttataaaaggaagaaactatttcatgaactagttccattaatcagacataagcatatgcaacatctggaaatattttcttcttatggggaaagttgaacagatcagcttaacaatatttttttccagcatttttgtaaggcattctaacaccttttaaatgcatctgtttgtttctccctgaaatgaaagattattctcatagacatagctgtaaatatgataaagcagccatgtgaatgactcatgtgtgggctgtttttctgttgtcagtaaagttgtatttcctggtgtttatcttacgaataatttggtgataaatgtgttcacctgaaaagttgtcaagatacaagatttagtcatataggaatgtatttctaaatgaatagattaattatgtttgtatagttttatcaaatagccaaaggtcttgagcttagatatccaaaaataaccttgtgtagtaattatgtctttaaataacaggtgcctattgtaatgccatggagtctgtatttaaatatattgataacatgtaaaatgttgataaagaagtttcactgtttgcatagtgattcttgttttattatacgtcctgggatgtcatcctggcatttatatgttgcaattttaacaaaatctgttactgagactaggagatgtgtgatttgggctgatttattagttttaggtttgataaatgaagaaatttaacatgtttggtattgtttgatgatttttggtttgtagccaaatagagcagatactttccttataactttaaaaattttctaaaattaagatttctaaccaatataaaatttcacttaaactaaaagtttatgaccactagaaattgagacctagaaaacacaagagaagctcgtttcattctaagaaatatcagactctgttttaagaagaaacaaccccttgttattcatgttatctgagtaagaaatagattgtgccactgcagtaaatgggatatggaataatgtgggttgtaatgacaaatttgtctttttagatgacatctttatttttggcctatttttttcctaccttttaattttaatattcagctaggcaatatttcacattattctttaaaatggttcagaataaaatatgcttgcctattcctatttttttattgtccttcaaaaatcacaaataaatactctaaatatataatgacatcgaggacataaaaaggaagaatatggtggatctttttacatgaagtcagaaaaagtattttttaacatatataatcataaatataagcagatagagagacagccaaggaggaatattaaggagccatgtgaaaccacttgttaaaggcaatccaaacatgtttttaaggattcagaataaagttaaagaatcttgtaaaagaatgtcctttgaaagaccaaatcctgccttatagactgatgccaacttgtctgaagagtgatcttgtctttgtttttatcccatcaggtaaaaagaactcttaattggccatgttggaaatccaaaagttcagaaattctcaagagaaattactcgtcttagggtttaattgaggattttattctttcttttgcagttccctgcctgagccccaaagcctatatttaaaggttaattagtattcaatctcattgtaactgctgatagtgctgaaggaggttaccctgaggaagtattaatactttttctaaatgggaaatattttcttccactttttatggggttagaaatgtccaatcaactaatgctaagatgaaagaccacaaataggagaatccctggtcgctgctgctgatgccatttaaaggggccacttgtttcagtgagattggggtaaaataggtacatgccaacagggaccaggcaaataacaactttgaaagaggaaggcctgcctgaagaacatatagacatattgaataatgactggaaactgtctatcattcaaccctaagcctatcattatgtgatcataactgcttctcagcactggccaattgttaccatctaggaatcctggtccggtattaccaaagctttctaagagagttttacaatttagatattttcattttggaatctctaactttactgttaactctgtttttcttttaaaacataatgtagaccaaaaaaggtaagtcgtaagtctgaatgtggcccatgtgggccttgtgtttccaacttttagtctagctcaagacttagaggtttgctgtccaatatggtagccagtaatcacatgtggcccttgaaatttaaatcaattaagttaaattaaaaattcagttgttcagtcacagaagcttcatttcaagtgcttggtagccacgtgtggctagttgccactgtatttgacagtacagatgaatatgtccaggcttgcagaatgtttcaggtcgacccctgggcccacaactcttttctataaatgctttcatttttctctcttcacaaggaagtaaacagaacgttattctctttcagctctataggaacaggtaaacaattttaatagagtgtaaggaatcttggatacagaagttgtaagggctaaatatcattgcaaagtggaggtctttcctggccacagttgcccttaaacatggttgtctataatggagtcacatcctgcacatatttaatttactgatagtcaactgaatgcatttaatttactgatagtcaactaaatgcattcagtataagaaagaaagggaaaataaaataatgtgctaaattctgctaaccatttattcaaggagtggatgtaaggaagggaagtctgagtttatttcttgtctatatattgacacagtaatatatatctaggcacacagagtactatacatagtactgtatttggtgctatatgtatatatacacacactatgtgtatgctgtcaattctatatacatatagtgttccatttttagaatatatagtacatatatagtatatgtgctatatgctagtctatcataatatagcatatatatgacattttaagcataattttgattatatgcaatttgtcctttacatatttcttattgctatgtaagatctgatatcattgttattttacttttatgtgtcaagacgagttattgttcctctaaattattttggcacttaaagaaatgaaatcctttttgtcagatttataagtccagatctctgtgttcatgctcaagttcaactcctttccacatcctggcttctccagctggtgagctctggtccccacacccacaatcagccacatttgagagtaatcaaatagccacatggtggaatgaagacaaaacataaacacactaaagaatatctacagtgcctgaggcaaacagaggtagatacacctcttactgggcaacttaaacttggttgcactatcatctctcctaggaagcgttcttgacatccttagtgctggattctgtgctcaaacaatgtgcccaaccgttgcattgcattacctatatgataaagcttatcaaaatgaagtcagattgccctagtaggctgtaactcctttaaaagtgaagacacctttaacggtgaagtgtgtccttcattcttacattccaaatgcctagcaaaatagtgaatgcctaattagtggcatcaacaaagtggtataaaggtaaaaaggtggaaaacaaataatggaatttgggattgtattatatttcaggagtcaataatatcatgaaggatcacagggtcagaagttgttaatagttgattctgtaagatattcttaaatttgtactgagtcttattttttggctccatttaaagacaaattgccttgaggtgacaaagatggctgcctggaactccaggctactcatttcttctgcaaaatgtcaactggaagagtagagtatctttctaataaatgtcatcaaaaactccaaatggtgtcagaaaaatgtgaaataaaaatgaagctaatcctgtcagtagtcaatacccagcagagacataaaggttagattttagatattaaaggtgatagtataacaaaataaatcatatcctttttttgtttctctttcttgtgttttttcagtggggcaaggggaatggatgtacacgtattgatcaaacacaagctaaatcagttgggtcacattcacattcttaagcaatcggtaaggttgagccatggaatgttctgactggccaggccaggttcgtatgaggagggctgctttaaaggagaatagaggagctgctaccaggaaaagctaagatggctgcagggaaggcaataagggaaaacatctgtaacactccttgaaataattttaagagaatccctgattgatatgaaccaggttagaaccatggaaagtgaacagttgtttttaatcccaatgtggctctctaatctgttttatgtttttatgtatgttcaaaatttatcgatgagtgagaaatgggaatctatatcataaaacacattttaaacattcaattttttaaaaaaacagcatggcaactttaactcatttaggtctttagcaattattgctgaagtctaactagttatttttggataaagtattgaatatgcaaattcagacattcattctttcgaaggctgcaattattctcatcacttcagtaaacatattaacaaacattgcatttgaacacagacacatttgcttattaacttgaaagctgcatctaaaaccacaaattgcttctgtgattaaatttctaattttcctgtcaaaccccaaataaagtattgcctgttgatttaacaagtgtttagtgtgggcatatttcctaaacccaaatcccagacccccccaaattttcgtaagttattttgttcttttcgcgttggttcatgctgaagtttaaaatgcaacgtttgtttctctctagaatgttgtttgtatgtccattgtccagaccagatcttgtgtgacagagtagatattctgaaagacaatagctttatataatcaactgtgaggtgaattctatttggggtttattttttaaactacttaaagtcggttttgttagcttcaatttcaagttgtgatattgcctagccttattagcaagttcaaatggaagacacaatttagagcctgctgctttaaattatagcaatgacaacatagatctgtgtttatattcattattgttattccatatgctagtgtggttttgtgaaaaggttgccatttctgataatacctaatatgttaaataataataactagtaagataaaggaaaataatgatgtattaattccctctatctttaagattgtttattggcaatatggatgaccacagtccgtgaagactatgcggaggttagtaatggctagggtagaaaatagaattagattgctttattcaagaaacttctattagtccctgtcatgtacaaaatatgatgcctgatggtagaaattcaacagtgattgaaatagtcattatccagtggagtttacatactttgaaaagcaccttttgactcttagaatttaggcttttttactgatttaactcattattatacaaatttgtgtttacaggcacacacatacacacacacacacattcgttttctttctgtctctcaaacatagtttgttctttgtgttggaaggcagtgatttttataccctcagccactgatgttttagtttatttcctgaaagtgacaatgaaagtttttatcatttaggagtaataactaccagttttgaaataactcctatgtcaggtatattatgctttctattcaggaatcaaaaattgttggcctcagggcatgcagctgttttaaggaaattgtattcaaattcatttataggtggaaatctgctttagactccaccattatattttattaggcttggtccagttctctcagacactaccttttctagccagtgtccctgttgtgtgtagagaatgtaactaagatttaaaagaaggggattgatcaaagatacgctcccttaagtaggccagtaacccaggacttctaattccagtaccccaaatatttctctctgattattgactgagacacaagttcacatagaaccttcacacaaaccagtttaagaggatgaaagctcattgagaattactagatttgtgaaatatgagtaataaatcatttctcacttgtgattctaaaagcagattctaatttgtgtaaaatgagtgtttgaacactgaaggctgacactgaacttgtaggatcattcaagtgtgttacaacatgataattatgcaacagtgtttaatcttgtgacatttaccaccaagctgaagctacaaggctactctgcttctggagcacaatgtaaatgttatatgattgaaatgctggggtgtgtagccccaagagacacgaggttgtcttcttttgttccagatcactgcattaagccttttggaatgggatttgggtatacaaatatacttttatgaagttttacataattttcatatttcaaaaagatttcattctgatacttagagttcctggtgaacttttaaattccttggtaaaagtagaaatttgtaatttttacaaagaattatgaatatgcagaaccaaaaggcaatgtttactactaaaagcttcccaaatttatgacctgagtgtgccatttacctgtcacagcttactactgaatgtttgaatgttgtgttcatgaagcccagacagttggattacagtttcctgcaaagaaaatgagtctaatttgaagatttattggacacatactttgtaaaagaaggagctgaacctgcgtatcccttcaagttttttttgtttgtttgttttttgttttttgttttttgagacaggatctggttctgttgccaacactggagtgcagtggtgccatctcagctggcagcaacttccatcttccaggcttaagccctctcaccttagtctcccgagtagctgggactacaagcacatgccatcacacctggctaattttcacattttttttttgtaaagatggtttctccgtgttgcccaggctggtctcaaactactggctccaagagatcttcccagcttggcctcccaaagtactaggattacaggcatgagccactgtgcctggcccttattattcatttcttacatgaatgaaaatactagacatacttagaaatcagtcccaaatatgagtattttgcattgggaacttacatatactagtttgtttctcaggataaaatattaatatctgttggcagcttaggcccagagattacttgcacatttcagagtttaaacaaagacaccccttttgagctcacatattttcagcaagaggaaaaacaatcagtgtttaataagatattgagaaattttatataacctggggtgagttccatttaatgatgaatagtattaggcaggagaaaaataattatattgctttgttaaaagaaaattaacattcttctggttatggcaagtatattttagctctaaagagtttactaacgtgaatacactaatactttgggaacatatttaaaaatgcaggaacatattttaaaaataatagtctttgccttttcatatagtgaaataatctagagattgtgtctgtatgatgaagaccgaactaaaggaagtgagaagcgtttgtgtgtaatggaacaaatctttctccttttgattcttcagtcaaaacataaggatgatagttttacatcttggacacctaatgaaataaagtatattccagcatactttatggtttcttaaatctttccatctgttaaatatgtaagaataagtgcttctccatatttttttatctttaaaattttccatatagccactgtaccttgattattcttcagctaaacagaaaaacacaattttcaaatgaagccatcaggcatgcttagtcaggccataaacattctaagtcctgagctaaaaagtgttttttcctataaaaactgctcttcttagataagataaactcaagtgccctttgtcatgagagtctttccttcaaaagtgtttgaacttaactgcatcttttctgatttgggtttagaggagcttttcccgctgcaagcatttagtcacttagtaactgagaaatctcttacagcttaaaaattaaacccacccacttgtgatttactgtcagatgtattctttaaaagtcaatgtcagtatgtattctcatcccactttttgctgacatctcagggcaggtaccaatgtcatccagccataggtggaagacatagtctgttccatgtaaaaggagaggactaaaagcattcaatcgaacatagaaccaacatgtgcttgatgggaatggaacagaagagaagcaaaggggacagatgggtttgcagcctttgatgggacctcctcccatactaaccatgatatttgcccgtttgttgaatgccttccctgtggaagcactgagctgagagctttgcatacattgtctgaataaatttgaagagcaatcctatgggatagatggcattctctccattttatatgttaaaagcttaggttcaggggtgttaggtaattttccatggtcatgcagtgggtgtcaggtgagtccaactgataaaccaatgagcagttggtaccaaatcccatttcttttcattatgctgttggttgaaaggcatgactaaggcctggggattaggcggaggggtgggggtgggaacagaaactaggaaactaggggaaaaaatctaaaaaatgtgagcttcatgaagtcagggaccttttaccacaacttcagaacatagaaaattgcccagtatagacacttcataaatgtttttttactgattgggaagaagggagggagagaggaagggaggaagggaggaagggaaggaagaaaagaaagaagggagggagggaggaagggaaggggaggagggagggaagggctttctaatcggttgttgaatatgaaataggctaaattaaaagtgagcagttcttttctgcttgtgtctactgtaggcagtccatggttacttgttggggatggtctagatcagttcttctcaaacttgaatatgcatattagtcactgggaaatcttaagatgcagattctgactcagtagatatggtttagggccatagattctgcgtctccaacagactctcatggggtgataatgctggcctgcagaccatattgtgtttcagagtattcacaaggagtgtgaatggatactttttctttattttacttgcttttctgaatttctgtagttctaggacttgggatggaataagatgaaagaaggtttatgagtgctcccagttcaaattcaaaccttaagggtagacttaaaatcaaaatgagacatagtgacacaaatgttcatgagatatggacttgatttgggaaggataataagagagtttactttgcaaataaaccaaacaaaaaccaatagcagaaatctgccgtaaatgaaaaagatgttgcagatttttctttctaattttgttccagttcaaaagagaagagttggaatggaacctccagtttattctcttaatttcatttgggtcttcttattaaaaatgttgctttaagacctgaggaggtcatatgtgaaggaaaacagaaaaagtgagaaagccttgatttttaaaattagcaaatgataaaataaactttgagcagtaaggattaaacttataaactcacccattttctttactactcagtcattaaaacttcattatgcattatttcagatatagaaaatgatacagacatacaatagggcataatgataaacatccatataattacttcttaatttaagaactaaaaccaaaaaagctaaatttcctactctctctccatgagagctttaaaataccttaaagttgaagtttatggccgggtgcagtggctcactcctgtaatctcagcactttgggaggccgagctgggcggatcacgaggtcaggagatcgagaccatcctggctaacacggtgaaaccctgtctctactaaaaatacaaaaaaattagccaggcgtggtgtcgggcgcctgtagtcccagctactctggaggctgaggcaggagaatggcgtgagctcaggaggcagagcttgccgtgagctgagatcgcaccacctacactccagcctgggagacagagggagactctgtctcaaacaaaaaaaaagttgaggtttataattttcataccttttaaaatacacttagtacataattaataattatgtaatattgatgtattacactatataattatacagtataattatatataaatatataaaataattatgtataatgattatatattttaatgtattatacattataatgtaagtgtattttaaaagatctgaaaattataaacgtcaactgtattttaaaacttcacataaatggtatctaactgaattttttaatttacctttttatgcaccattgcttgagtcagccatgtttataaaagtggcccattttcacagttgtgtaatattccatttaactttatgcacttgtatttgagatgatgttcacatttcatctctttatatgttttctcaacatatgtgcaggttaaatattgtatatattaaagcaacaatttttagatggcccataacatcattgaagaactctgagctggaattcaagtaggtgccactcctgatcccaccaattaatagttttggggacagttgtcaactcacatggttgctttattaaaatcattatctataaaatgggcattatagttttcatttttggcaaattattataaaaataattgatatgaccattgttataatatgctacaatttacagaactgatggcagtgtaattttattataaaaattgggtcatctaggagctgggtgccctgttttttacggtaatgtgttcttgagattgtgggatatgaatgagtatttaaaggtgaagtactgtgatatgtcaagcatacttactgtttaaaaactttcagcttaaaacctcttatttaaaaaccagcttctctcttcatttatctttaggcttctcgttgataaatatggctctggggttagtgcctttaccttttccgaccccctaggtagtgtttatggtcatttaccacagtgtaccattttgtaaatagcactgtaatggcttaaaaaagtggagaatgcctcggggacaggtatttacccagacaaattgaaatggatagttgagcacttacccaattaatttattaaatgtgctcagtcaatctggataaatcaaagaaatgtgctgttttcttccttcattgtcagcaggaccttggcctaaagtatctgagataattatctcaactttctacttcatctttgcctatacagacctagcctaatttttccccagtgaacaaatgaaatcattcccacctcctaagaaacctttaaaaactttaactgctagatgctactctgttatactttctactgtgctttaacttttcgtttctgataaatacttgggcatatttgatcttcagttatgtaacacttgaataatatatgtatcactttttacttttgagggataatgtttaaagtagattttataatggagagccttcttttaagttaaaaatactaaggggggggaaccttgatatttgttttacagatggcagctgaatggaagtgatattgatatgagtatggaacatcgttataagttgaatggaggaaatcttgtggttattaatcccaacagaaattgggatacaggaacttaccaatgttttgcaacaaattcacttggaacaattgtcagcagagaagccaaacttcagtttgcctgtaagtttatgttcacatgtctagcaaatccaacattagaaaatatgtaacttaatttgtgtagtcgttttggatttcagaaataatacatgggttttattaattcagtaaatagactgagaaagcaattcagtatgatttttggacattttatagtgttcaaatcagagctttaaatgtgtgtgtgtgtgtatgtctgtgtgtatgctggtgtgcatgtgtgcatgtaggggtgtgtgtgtgtgtgtgtgtgtgctctattttagtatttcacaaggattctgtttagggaacagaaaagaatgcagttgaggatatttttattgagcagctactatgtgcattttactgtggaaaaaaatgcgaaagaattgtcagagatggtccttgcttttgaagaacttttagaaaattccatctgacaaacctgaaaatattaaggaagaaagactgtcagaacaagaagaagttaccatatgtggtgacatgttgttgactcctctggggtcttatcacagatgacctcacaaattaccctcagcacagctcccactgacgcctgggctctgggagccattttgtaccatgttatttggacctaggtgggcacatagcccaacctgagaaagtcacatgctttctctaggaaatttggacttggacccagaggctcaatttattttttatctttgcttattttctcttttttttttttctttttattagtctctctttattttagttgtgtattttgtacataatgcatatcatgattaccttggttctgagatttcttgtagttattcacacctcaataattctgaaattgcaatgcatgtgttcttataatgaggtagtattctttctgttttccccataaactttttattaaattaatgatgggtcatttaatgtctagcctattcttttgctttctattttaacaatggcaagggttggctttgcttgtgccattatattctgtgtgttctgtttttcatatttattttgttctttcctttgttttctctttatttctttctgtaggcaaaatattttttacttgtatcttctctgcatattttgaaagctatatgtgatgtttatattatacaactagttacccttaagttaactaaagtactttgtatatatttctctaatagacagaatttaagtttattttttcagagtttctctgttttaaacaaagagtttggtttcctttttcctcttgagctatattttgcaggtttagtgcaatttccatggttgatttaaattatgttattttaatgtatataggaatatatatatatgtttggatatgtataaatatatatgtaatagtcttctcatagataattgtgtatgtgcatatagttgttaactagaattttggcaaaatctatgatgtatccatgttttacctggcattactgccaactactagacctcttcttatttttatattcttatttcttaaaatttctcaataaattttaaaatatttgtaacatttactatgttacattaaaaaattcaagtatgtttcatgctttttcattttaaggaatgtcatcatattcccttgaaagtgaggacatcatttggttgataataaatgttgagtcttggagctgtttaacagagaattccgagtgttttgctctgttgtcttctggaactagtgctgctgaggagaggaaggtggccaggctaatttctggttttggggagttcaccaccaccccttgtattttggggttcgcttggttgtatattggaggattattttttcttcatctttctagtttaaaacatatagatttccagcatatagctaagtttaggttattttaatttactttgcttagaacttgaaaaattccttttttgtacttatacattttgtatacagttcaggagagtttccttttatatattttagttttatgttcaatttatattttcaaatggcatgatcatctatattggatttctttttttgtgtcccattctttgaaattcttttcatctcagcctgttctttcctatgacttcctgttcctgattcatatttttgtattctttttgtattcttttgaagatacagtcagttttctgaaatgctatttatgatcttagaggcagggtttcctccaccgcttccatttggtgtttctatttttatgcttaagtatgttcaataggttctaaaacaaatcttgtctaaactcagtctttgtctacaagatggtgttggtggactacccaggccctgcagtctttgccctgtgaagagtggcagatgagcaattcgcagcctaattccttgtttctaggagtcattcctcttataaagtgatacatacattcctctagtgatgtttttctactatggattcttaatttcatacctgataacatatgaagaaatataataaacttacaggtatttcctcagtcagcccctcctgaaaagtatgacttgtaagagaaaaaaagaatacgacatgtatgacaaaatacctctaaaattatctttcacctcttgcagtctgcccctagttcttggccagcactttatatgggcagagtggggtgaagttgttgaatgagggatgggattttaatctatttaggagctaacaagctagtcttactgtttcatggaggctggaagaagacatgaggctcccaggtcagtgactaaggactttattattcttagaacataaagcatcatgaggttcagcatgtttgattgagttccccttaactccaagtcccacagagaaatgcaaaaaggttagggtagatactgcacccatctatgggaaacactgggcttagataatccatctcttttacagcaaacagtaagcaagcctggtccttgtcccagagggagacattaccttatccccccaggttgctctctgcaaacacatccctgagatgagagcatggcaatgagcagttagaccattcattccttcttggcacacccagcaaaaacttgcaagagagcccagagcacgtggaagattgcctctcccaatagaaattattcattttctttgtttggtactgtccttgagtttctgagttggggtgcaccatatgaggatacataaggtgagtgaagtacatactattttcctacctttattataattctccctttcgtaaagcaaacctaagatgtaacattgaataccttaggtttccccccagtctgtccccctctgctttacaagttttatttattccctatatattgacatttgattgcttagctgtgttgctgtacagtgaaattatattttttgttttgttctgcatttttggtgtttttctaagtgttttatttggaagttacaagaagcaacattgggtattcttcacctgacaccacattggactggaaagataaaaaatgttgtttaatattcatgtggttgggacatagatttctgataaaaaaccaaagaagatgagaaaagaagtagaagataattactatatgagtaattccaaattattagctacagtagagcattgctttaacttcatagccttgaagaaaaagttatacgctaactgaaagaagggattagaatggagacccttgtattagtaggatgctcatgacttcagaggaatcttaactgtctttgctgcaggcaaatggatgttcaagtgctgtcattgaaaaatgttctctctaattgttcaatttagctgtgtctcttctcttgactatgttgtatatttatatgattagccataacttctttgtttctctcagctatggagaaagtacttctgtgtccttcatgggtaaatgagtaaatgaaaatatggttgatgctccacttttaacactagtgaaaaactaaagagattctatcttaatgttcgagtggcttgaaaatagtggttgtgataaaatgaaagtgaaaaggccatacatctgatatgtttaccctggattttatagattccctttatcacatatttatcagctagtttagtttttataatgaatgatttattattttaaattcccttcttagttttactgggatagtgatgccgtctttctttaatatgttaatatggtgaacatttactagtattaggtgaccttctattcctgggttagtttcaagttggagtttatgcagttttaaaaaaatacttggatgttagctgtttgctaatattttctgtagtacttttgcctatttatccttttctggctatccttttttggctttactttcaaagttattttcacctctaaaagtgacctggagattattccttattttttctgttcactagaaaatgtcgagaaatattggaattatcatttccttgaaaaaagtatgtaacttaggcttggagttttctttgaggaaatgttttacctactcattgaatgtattgagtattatttctttgtgataagttgtattttttccaggaattttatccatttcatttatgttttctaatatactagtaaaaaatgtttcaaaagttttaaaattatttttctcatttctgctttatctagacatatatttaattttctcttataaatattatcttggtacacttttaaaatataatttgttagaatttgatgttattattcctcactttcaaatttctacactctgtttcattcatttttctcttatctttattgttcttccaaagttgttgtattttttatagttcttttcaaattacttaacttgtatggttaacttattcttttctatactttattctcttctgatataaatttgtatggttttaaattttcctgaaagtacagttttagctgtattcaaagaattagacatatagcaaatttgttctgtttcagttcagtaaatgttataatttcattatgattttctttgatttgtgagttatcagacgtgacatgtattttaaatttccaaacatgtggagttttactagtcatcttttgatactgatttctaacctagtatcccattgaccagagaatggactgtaagatattaattcttggaaattgttgatatttttcctgtggcccaacatatgattagtttttttaataaatgattcatatgtccttaaaaaaatggatattctctaaatactgggtatggtgttctccatatgttcattgggttaaatttgttaattatgttgctcaaatcacctatatcattactgatgcctaatctatcatttttctctcacattgatgatggcttttttagtttctcctggtatttctatttaaactgtatgtatttagtcaattatttgtgtctaaaaatttagagtgactgtatttttttgtcaacaagtggtgacactatcttcaatagagcattttgccttctagtttatatggtaatatattaatattgttatattaatacggtctgatttttatgttcttttttttctttcttcctttcacgtggattggttgaactactttctccctgaaaagcactggatgttatacatcctacttattttcttatagtaacttccctagaaattttagtatctatgtttaacaaaatctaaagttaatcaatatctccaacaatgaggattataatgttttaaatagtatagcccacctagagaaccctatactatttttgctgaatatttttgctgaatttttaaccctgtgaattagacattagtgctaatgtttcgtttatcttctagatcagaaatagtgtgagcatgtacaaacatctatatttttttatttttaaggaaaacatcaagcttttgtccatattttctctatttttcctttttagaagaaactgctttcaacattttcactgtctcttttggtatttatctaaatttgtgtgaataacttgcctatattgccgcttactgatttttttttccagttttaagtattactgttgactgttaactatgccagctgatgctacaacactctcctaccaccaccttaccaccacagcaatatgatgttgcattattatgaggcttacaaaatccataaattttaagccataattcttacaaaatacgtaaagataaaaagtcaaatgcacactgcatttcactgaatgtgccacaactggatagagtccccagtgatcacaagacagtttctcaaaccagcccacatccaaaacttcacagaggatacaaattttggcctgcctgtgtttgaaactagaagatgggaagaatactgtagaggactggaaccagtttccagttgattcatatttgaataagcatcagcttaggccatgttattataggattttattgggccataatttcagctaggtcaatattcagtgtttacatcactatgactttgtaaaggatatccagagatgagttttgcagcaaacaataattctgaatatttttcctttcatgcatgatttttctttttctaatagtagtcttattacattattttacttattgatttttctatagtcttatacttaagtcaaccaaaattttggccaaatttttggatgtcctctcaggtattgagatgtaatcagatattctgttagttttatcttcttggagaattatatcctagagccatcagagtgctccagttggattggttttcctgtatatcaggaacaaaattgtctttctgggatctcccttcaccatcactcactctaatgatcccctacaaatctctgctgtgtccaccccccaacacccacattccacatcttcgtctttcttggtgttcattgttttagggtgtcatgtcctccatgtcctaaaaaaggatgcatcatattttttattgttctagaacatgtgttctaaaaattagtatgctggcatactcaatcgagagacttagcttaacttagtatgaataatatgttacaaatctttttctttcagaatgttgaagatacttcgccttgctaactagcttgctgtgctgttgtgaagtctgatgacattctgatttgtggtatcttgtatagagaggcctgtatttctctagggaggcttctaggtattctctttgcccctagttttctattatggcaaaaaacacagttacttttgcaccaacctaaccaaattccacaatgacttgatttgttatgggtcgaattttatttcacatcttggttactctgtgggtccttgtagtttcaaaacatgagtcctttaattatgggagattttatgatttcctgtctttagttttctctgtttcctatttcacacatattattacttgcatcttgaaccacctggaatagattgtttctctcaacccttcctccctcccccagacagtctcttcaaatttccttctctttgacttttatctctattcttgatagactactttagtcctttctttaaacacttctattgagtttttaatacctatcataatattttttacaatttaagagacttttatatttgaaatttcctttctataccatattctagtgtaatagttgtaatagcttctcatatccacatcaagatataaatgatggttagttgcttttatgttttcttccctcatatgaactgttttatccaggttgtttcattttagttttgtgttggtttgtttctctctttcaagtgggaaacctttttgcagctatctggttatatttggttgttggcacaaacttaggagtgtggaactaaaaacctaatggaaacttagatgtgcctgagcagagtttgtcttcaggagggtcgctatggtgtcgctcatctcactgggctcacctcattattacctctttctttttgagaaagtcagattccccagaggggaaagaaatccagttttcttccttgagggcagaaacctccactggctcctgggagctaagtagaaaagaggccttgggggattgcagaatccagtgtgcatacatgcatttaatataccttacaagaccctccacaaaacatcacctgcagttcagacagcctctccttacccttttttgagaataagcctcttctcttctagtgtgggggagggcactcacctggctatgtggacgggacagagaacctggattcctaaccacagcttcaaattcttaccttcccattgtcatattgcatttcctcttccagatgtgcctgctacccccagtcctaagccgttgaggattctgcgcacacatcaatcacttccatgcttggctcactaaaagcttaaaagtcatctttctccatgatgccaaaccatttaatatcatcacacctgttttctaacatttacatttgtactttgttcttctattgtcctgtctttgtgggtttatgcctttatagactatctcttacctactagtaagtcctagtttgggaatatttcaggactaagagagaaatgacttctgtgtttcccttagagccttattgttatttcacataactgatgtttgtttagctttactcctgtgtttactgtttcccttgcacccattcttgcatctggaagcatttccttctttgagatctgtgtttttttttaatttttttaaatttttaattgttgtggctacatagtaggtgtatatattcatggggtatatgagacattttgatacagacatacaatgtgtaataatcacatcatggagaatggggtattcccccaccccagcatttatccttcgtgttataaaccatccaattacactctcagttattttaaaatgtgcaattagcacatcttattctgtctaactctttttattttacccattaaccatctccacctccctaaccacccctaatcccccactacccttcccagcctctagtaaccatccttatttaagcccatgagtttttatttttagatcccacaaataatatgcagtgtttgtctttctgtgcctggcttacttcactcaacatgatgtcaggatctgtatcttttagaaatccttttactgagtccctcttgctggtcagtactgttttatttttcatctcttttcctctttggtcttaaagtgtgtttattttgccctcatttgccaaaaaataattttttagtaaagtgtattgctcaaggcacagacacagtagcttactttctgggtctgaagcttatgttcatcatttagcagccatgtgactttgggcagattctaaacctctaaggttcttcttctgtacagacaggataataaaatttatctcagtaggtgtgtggattaagtgagctaatatatgtcaagcacctggaacactgtctagcacataatgcatgcgattatcatttttatacaattctggagagtaattcttgggatgcatgtcttatggaaactctggaaaattcccagccatatatgtgtcttccacttttgcttatcccccatgcctattctttactcctcctggttttccttttgagtgtattttgaatcttctcgttatctattctatctctttttacctctctttcatattttccattctgtatctctttgtgttcttccatgttaactgcttagctctagcctatactatattaattcttccgtcatctctgcctaccttgttattaagctaccctttgaggttttaattttaatgaatatattttccatgtcgagacattctatctgattctttttcatgtgtttctgttctttattcagagtatcattattttctgattatttgacccctctctcattttcctttgttactttatttgtttaactctaaagtatttaggtattcattcatagtgttgttttgttagatcagaatattgcaaatgctaacctgcgatttgttgatctgctgactcttgttgtagtgaatatttttgtctttttaaatttttgatgcgaatttgatctttagcagagtttctacctacctggacaaacatttgattcttgttagcctctgtttaagtagtgtccttacctagcagctgttattgctgctgccaggaacctcagggctataccaaagtgagaactgtcttatgttagtatattcgcttgatgtagcccaccataaatagtcaatgttcattactcatggtagttaggttctataaagtcactgctaacactgaattaatgaatactgaactattgctcctaagggaaatacaagattaggttcctgtgcacctctcaacattttcctcaatcaaataatacctcaccttgttttgtgtgtgtttctctttaaagacaccttatatattgttgcttcattaacattgaactcatggccaacctcactataactcatacctgaatgaagcttagctaacacctatattttctccgtagggcatgtcacaaacttctttcacatggaaacactagactgcatttcagtactatacctgggggccattttaaacagcaagatcaccaaacacagtgcaaacatatgaaaaatgtggcacaaaatgtatggtgaaaaggatatttgtttataatgagagctgaaacaagaaggcagaatgtcactttggtcagcttcggctgggaatgtgcatatgaggaaaccccactgtttcaccactctgcacgtacctgtgaatgaccttgaaagtactgcacatactgattttggggtcacaaataaattttagtgagttggtgcattttcaagtatgaaatccatgaagaagaaaaattgactgtatattacataaatatgaaaccccaaaccatgtgaggtataggcccagcagatcgaatttttggttgaaataatactcatttccaccgttccttctatctatattacaccaacttcaatgagaaagagatgaacaaattaattttctagtcctttccccataagtacagccttgcagcgatgcaggatgtgtgcaaaacgtcttatttctaaatggcaattccctagcgttaagatctcatctcttctttccacatgggcaactgaacctaagctaccaggttaccaaactaatcctgtcatcctccatgccctaattacactgttccagcaaccacggtgtaagctgtagaatttataagtctgctttgtggctttctatttttgcttagatatgcatttgatttaattttgttgtattttaaccaacattgctgtgctatttgtggaactagaattctacgttttcttgaactcctttttattttttattcagttctgttgcttaggaaaataatgttagtgagtgaagcaggttttgtttaagcaataaggagtattagggtctgggatggaccagagaaggcacatgtattagtctgttctcacattgctataaagaaatacctgagactgggtaatttataagtaaaaaagttctgattggcttatggttctgcaggctgtacaggaagtatgatgctggcatctgcttacatggctgggcttctggggagatctcaggatacttagaatcatggcagaaggcgaagagggagcaggcatgtcacattgccagagcaggagcaagagaacggtggggaggaaccacacacttttaagatctctcagcaaaactcactcactgtctcaaggacaataccaagagggatgatcctaagccatttctgagaaaccacccccatgatctaatcacctcccaccaggccccacctccaacacttggcgttgcatttcaatatgagatttggggaaggacacacatccaaactgaatcagcttgctctttctaaaggggactctcagttgggcacggtggcttatgctggtagtcccagctacttgggaggctgagggaggaaaatcacttgaacttgggagatggaggttgcagtgagctgagttcgtaccactgcactccaacctgagtgactgagcgagacttgctgtcaaaaataataataaaagggactatcactactcagctccccattttgagtcattttattactcctaaatttatatttcccagcttgacctctgccctgaactccagtgtccacatctctgggtatcagtagacatctcaagcttatgttttcaaaccataattttgattttgcccataaacttggtcttttctgatgttctccaccttggtaagagggcacatttgttgtgttgttcagatccaaactgagagccatgtttcagctctgtctctctcgtattccacatctatttagcaataaatctgattgcatttatcttcaaaatatacccagaatctggccactgctcactcttcccaccagtaccacctgtgaatgagagtcagctcgcctctcacctcccccgtggcaatagcttctgacatatcctgtaactatcactctttctagtactgccccactgctgtaatttcctcatctccatccaacaactagaatgtttcctataatttcatgctgaacatatcgatacctccctggacaaaacctccaatggtttctcatagagactaagataaattttactcattacctttgttccaagggctctgtcctggttcccgtatgtgatctccttcctcttccctgcacttctctcacacttatcttgccttacttttaggtgctgtgaatgttttcacccagacccttcccccgggtctgtacagtttgctccatcatcaggtcactgcttcagtatcatttcctaaaaattgctttctaccctctgtattttcaccacagttttgattacctgacattttacatcttttctatttgtttatttttgtctctcttaaagattaaaagactatgttgttcactggtacattcctacaaactggcagttttcctggaatgtagtagatgctcattcaatatttgttcaataaatgaaatgatgaatgagcaaatgcaggaccgtattaccaaagctaatctcttttcaaaataaagcagaatctgttctttacttgaattgtcttgacattttaaatgttggggactaaatttaaattttataaaagcactaaataggccaatcctgtaagcataaaacaaaacaagtctgagggccagatatagcccatgggtcactggttaatgatctctgacctggaagttgagagcagatatactatgaaattaaaaggattttattagattacgaaggagtctaccccctcacataaccagatatataagatagcatctaatcagtctggaattggtttatttttgccttttctttccctgtttttttttttcgcttttctgtttattttgcaatctttttatagaaagcagaaattgaccacattgctcctatcagtagagggtagcacattattcacttttcttagattatatttttttaattttttaattattatagattataatatttagaagcacatttagacatggaaagagaagtttgaagaaagattaaacaaatgcaaacagttttaaggatgaatcccagagtggctggctatatctgaaaataaaaattaccgacaattagctaaaatggttgtgttaaaatccgtagaagcctaattttctctgagttataggctgtgttatttctcataactaactagtgtggctaaaaatgcaaatttcatctttgaacagaagtgactttgatcacatccaaagctgctttgctgtgatggtctaaaaccaagttaaatttaaagccaaatgctacaactcagtatgccattcacagtatatgaacttaaaacaaaacaaagctttttagtcaagcacaatgcttttcaacctggtctcattagaaagttgtgactttttaaaaccaagtttccgttgagattaacattttatcactaacttctcagcctgtgtattttatgtctttccatataaatgaaacatatttgttatttgccttttgaatcataaaatcttttagtttgtacaataactgaagatatcttaggatatccatggtctcacagtattatttcaggctctacattattggggggaatagttagctgagacgattccattgacaggtaacttaatctaaattttcactggacttgctatgtttacctacctattcttaggtttttaaggtgcatatatgtgaatgattggtacagagagggcaaagtatgctcaaattaactagaatgtttcctaatcaattttctcctaaaagcatattgagatgagtttccatctgttggacactctgttgtgttggaatatgggagagtagtgcattatttgaaccactgaggttgagttgaatttggaatcttcatcactgagatcttcattatatgagcatagaatgttcgtaattgaacaagtggcctaatcatagtagcatagccaccagacataaagaaaggattttcactgtggagttataatgatagcatgaacaaccaaaaaacatgagagagacttcaaagtttgagttcattcatttattcagtgagcaggaattgagccttttctgtgtgtcggactcttcacaaaaggctgagcatttaggaacgtccttgttttcatggaacttatggtctagttgggaatagaatgccatcagattaatgcacaaatacatacaaactgggacagataactataaaggaaaacactagctttccatttccccacgatccatcttcggtaactgaaattcaatctccattcttccaccttaaaggcagaagtgaaaaagagcccagaatgttctagacttgaatcacatgtatttcagtgtagccaacaagtcagagaatgacatgagatgagttggcagaagtggtcacagcctagacagttcaagtttatgtaaaccatcatattccaagcactttagaggcccataaacagtggcatattttgatgtataagataacgctaggtgttctgtggcagtgaggctagagaggatcaaggattcaaacaaggagaatagaaaactaggaaatggttacttttgtttatagagttcatgatttttaaggaagaaatcgattttaaaatcttgagataaaaatgataaaatgcagtaatggatggcatgtggggaatgtggagtatttttctttttttttattatactttaagttctgggttacctgtgaagaacatgcagtattgttacataggtatacacgtgccatggtggtttgctgtacccatcaacctgtcacctacattaggtatttctcctaatgttatctctcccccagcctcccaccctgcacaggccctggtgtgtgatgttcccctccctgtgtccatgtaatcccagcactttgggatcccgctgaggctggcggatcacaatgtcaagagatcaagaccatcctgaccaacatgatgaaaccccatctctactaaaaatacaaaaattagctaggcgtggtggcacgtgcctgtagtctcagctgcttgggaggctgaggcaggagaatcgcttgaacccgggaggcggaggttgcagtgagccgagatcacaccactgcactctagcttgggcaacagagcaagactccatctcagacaacaacaacaacaacaacaaaaaaccgaatatgttttggcatggagtatttttctcattgagttggatggatagtagtgcagttcacagcaacattggaagaccagtatattttttgagaggggtaacagggaggaggagttgagactggtttataaagatcatgagtttgttattaaacacattgatttaatgacatcctctgcaagtaacctgaaaagtttctattccacctagtttcgttatagagtggttaatcaggcagccttgtcattcatgtttgcccgggccatactctgcccaaatgctcctggatgaaatccacccaaggcttttttcttcacttagggagccgggcccaggtctgactgtgacagcatgtagggagaggtgactttctatctctttcccagagaaggcagctttttataattcctacacaggcactgtatgttctgactatggtcctgctgctagctggggatgtggtgagctggaatggagaaggacagattcagatactatttttaaataacagcttttgagatataatttacataccgtgtaattccctgtttagagtatacaattccgtgtttctagtatattcacagagttgtgcagccatcaccaccattaattttagagagttattatcataccccaaagaaaccatgcccattagccatctctccatttcccccaaaaccccccactccagcccctaaaaagcaggaatctactttctgtattatgggtttgcctattctggacattttatatacacggaatcatgcactgtgtgttctttgatgactgttgtaaggttcttcatatagtagcatgtgtcagtacttcgttcctgtttattgccgaataatattccactgattagctatatcacatgctgtttatcgatttattagttgatgattattagggttgtttctgctttttcattgctataaataatgctgctgtaagcatttgtttacatgtttgtatgcagaatatttttttattactgttagatatatacatacctaagagtgggattgctaggttttaggataactctacatttaacgtttttaagtaaacggcagactgttttctaaagtcaccgcaccgatttacattcctaccagcagtatttgagggttccatctcctccacattctagccaacatttgttattgtttgtctttttattataaccatcctagtgggtacgaaggggtatcgtattgtggttttcatttacatctccctgatgactaacgatgtgagcttgttttcatgtgtttactggccaactatatacctgcttttgagaaatatctatttagatcctttgcccatttttaaattgggttatttgtctttttattattgagttgttggaattctttatgacttctaaatacaagtcccttgtcagatacatgcaaatgtttcccaccattctgtgggtctgatgagtttttgagtcatctctttaaatctctggagtcagttgttaggaattttttgtacttagtagactgacaagggctgtcttcaatttgagagtcttctagcggggttaaaatgacatactctactaatcacatcagtggcttagcgtggacggaacccaagattaatcctggaagacctgggttgtagtcctgactccactactagatgggagcctcttgtcctctctgggcctcagtttctttatttgtaaagaaggatcagtcacattatttaaaatactcttctgttctacccttctgtgattctaagattagaatttatgctatgaaacaaatttaaattgtttctagattgtgaaacaactgagagcattggatgaaatattttttctcttcttttttttaattgagattttcccaagtatcacagtataacaatggcctttagaatatgcttgcctttttccctttaaagcagtacttgttgaaactaacaactaaatgacaggcttggaacctatttttgtaaaacgatgtaattcagtttggaaaataatgtttaaacccctcccaaatctgtcatctggaggagactcatctgtcacgtatataggtgttgatcactggaagtggcacttgtttgctataaccacaggtttgttatgctagagaatccagaaacctccctattcctgtgtcgaactgcagttgcattcatggaaatccaattgatagtttagtgtatttttttgttttgttctcagctgtgggtttgtcttatctaaatggttttagctgatgccattaataaaaaataatctgttaattcagataattcaattaagatatttaccccagtggtgctggtattagaatggggtcatctctatcaatatgggcccattgatggaaatgaaattcagtaagttagactctttggtaccgatgataatatgcctgggaactgagcatctaaaagatttctgatgtcctagtgacatgtacatttaattttttaaattgtatttcatttaaaaaaaatctagattttctttgatatgtagccttggctagctcccttcccttttctgtcagttaccagccgtaagaagcatctagactcaagattttgcttgagatatcaatagcattttaacatctgtaaatgttgtttttgaatacaaaacatgttatatgtatcattgcagggatcaaagggaaaatgttgattacctttctgtaaagctgattctgattcctttcaaattgagtatgattttataagacctaagtcctgtgaaatccattcttattggagtccagtatcccagagacttagatatttcccaaagctggagacattatcagcccatttggccctttgattaactggcattcttccatgggggttttcttttgttccgatataatgccattgcaatagaagtagattgaatgcttcttggcatagatcagttttattttcttgaacctcagaaagattcttgcttagaaatcatctgcctgttgttttgttttactttccctctttggccactgtaggagtgttcctttattaccgttctgttgggattttttctgtcacttctaaagaactctaaaaagcaatttcttgtctatagcagaacagttatggcttgtctgtgacagaaagggttgcctggtgaaggtagcagctgcttgggtggtatatataaagttaaaaccaaatggcttgtgaaaggctagaattgaactcaaccccttaatttcagataaagcgctattatgtgtgtggtgttttgtagtgtatcatgtaccataatttttaggctgttgtgttctcttgctgtaggatgctaaaaatattctgtaatttcttcttctgtgtgagcatctatttaattgagtcctggtttaatgcttatccattataccgctgtgattctattttgcaaatgttggaaaatgtctttaaaaccatacctgaaaccctgtaattttcagagtaatgatctcttttggaggatttttccttcccccatcccccaccatttttgttagatttggagttacgacttcaaatcaaatagctttgataagaatatttccctctacatcttttcataattctgcatttggtaaaataactcttattttttagtcattttaggatgatttaatttgcaaaagatatccaatatcatttttttcttttgtgacttgtctgccataatctttctgtgttaaagtgaagaatatgtgactcaagagtatagtataccttttttgaaaaaaattgtatttgtatcttttttgaaaaaaattatatttgctataaattgtacttcggaactttaatttcaaaatcccaaaagatatagttttaaaaaatggaatatatcatcactttggttatttaatttggtagagttattaataaaaatttcccatagagaacactaatcagttatcttctttatatgtgcagactgtgattaaaactgctgtctgtcaatttcccactaagtttttatttctttgcactcagtaatactaatacataatgacgtacaatcaataggtacattcatttcttttatgtatcttttttattcctaatatcttgattgtagcctcttgatgatcaagttgaaaatttttatgttaaatacagtctcaagttattaaatttgttttaatgcattcactgaaaatctcttctaaaaatctacatttagctccaggttgtccagtagacaacttgttaataaaatgtcacattcaacccacaatttttaggtacattttcctccatgacaactcatctcggccttaagttcccattagaataggtattaatgagaagacatataattatacattttccagtttttttctaacaccaaaacagttatgcctcttaatgcataatgatactttcagcataatagttggggaatcgatataaatttcattatcatactttcttccgtttttgactgtgaactatgaacatctttgttattgatattttatccatggtttttctaacactgtattttggtgttgtcagcagctcaaaatccttttgtcttcaataggccctgagtccgtgtgcaagaaagtgtccagcaagactaatgttatgccacttaacatgtttatctttctccttcatctgtaaattcttcctaagttttctctgctcttggtgtgactcacttgccctcccactaaactcacgtattttctccatgtttctctccttctgacagcatctttttgtgtctgctcaggttccacttgctttaatttggactctttcagtgacaagcaatagaaactcaatgcagaactggcttaagctctacagggaatttttggcatctgcagctgaaaagtcttgggtaaattggctatagtcctagctggatccaggggttcaaacggtgccttcaggccttggtatctctccatctctgcttttttctctattggcctcattctggggcagcctccacctcctggatgtcagccagcatctgaatttagcagtctcaggagacaggaacttgcttctccttcagggttcagacacaaatcccaggcataagcttgaaataggagccctgcctatccctggacagccctgcgacctggtgtcctcacacactggcagggtggggcaatggagggttctgaaagtaaatatgctgttgtcagatagaggggtggatgctgtaaaagcaaagacatgtattgtgctacagacttttctttgtatggagaaatgcatttttttgtgtgtacaatgacttctggatagatataagaagaaatggaaacaatcctcaatttatcattctttctagattcttccattagaagacaccagcagagaaaaatcatttcagtgctgtttaattaattgaaggctgtagttggatcctttccattattttctgtttttaccttttatggtctaggttttttgtttatttgtttttgttttaaatcatgtaccaatccccacactctttgactgagtcgtgagtgtaatagtaacgataaagacctttttgttgttgttgttgcttctacctgtccgcacgatacttaatactccttgggggatcatttggtattctttgtatccccggaatggaacacaaagtctggtgaaaaataattttggaagttagcttacaggcctgctgtgtaccagccacttttataagttaagatccagttagttttaataggaaactgacattgtcagaaggttcttagggaatgtttatttacaaatttgaacaggatcaatggtaatagaaatattaaagcaaggtacatatactcttggctagaaatcaccatgacttttccctgtggattttgttttcaaattcaacagttgtgtcatgtggacatccaaatttaggtgcctcttgatttgatgccatagaaagtgtgtagcaccaactatgaatgattgttaatataaatcaattaatgaataataacttgactctaattaaacctctaggtctaactgcccatttaggggatagaagtacaagttaaagacattttaaaaagagatgccattaacctattttatattgtaattaatttaacagcacaaatgactgattttctgcaatagataaatggcatgagcaaaggaggaggaggagaaggagtgcaaaactgctacagatttttaaaatattatgccacaaactcataactatataatatggattttttttctgtgtagtcacttttcagatgccacctactggatttagtagctcctaattaaatatttgtgactaatgtcctctggaccaggatgtaagcactctggggcttggcagctggattttaagctgtaagcatatccttccactgacattctttcctttaaatccttctgcccatctcatgccagaccactgtcattatacatttctgcttttatatctgtatataccatcaagtatttcaacaaaaaagaaatcagaatatattagcttgggttctataaccaagtttattcagggagtaacagatgatacattcagttgagaattatgggggctgcttaataaatgtagattttatgattttttgcatatgtatttttgagctattgtaattataaattatacttgagcaattattatggaccaagcacagtactaatgaaagcttttatatagttatctcattgtatccttataacaactctatgaggtaacacagattgtaggaggggagctgtattgaaagcctactatttttccttctaaagttcatgctttaactactgcatagatttttgactctgttgaaaaagtactatggagagcatttaaggcccagctaagtttagtaggcaactgacattgtcaaagggttcctgaggaatgcctgtttacaaatttcaactgcattaaatataatagaaacagtaaaaacagatacatatgctcttggctactaaccaccatttattttccctgtggattttgtttttaaattcaacaattgtgtaatatgaattgatttaaagctgctggtggacaacacggaagactttagacaacagcgtcatttcattagagaggaagtgaagggtttgaataagacatgccgactctccaggagacgttgacctgggaacaaaacaacaataacagaaaacatgtttttcaggtttgcttaaatgattgaccaagaaaccaggtagaacagtgttaaactggaaacatgtaaggtttctaagatagtcttgtccctgctgtgagatatgtctgcatgaggtgcaaactcatttgacatcttgtgtaggaaatccagaatccagaaaaccaattagttcctcatagtggcattcacgaagggggtcggcatcataatgagagaaagaaccatggattctaacagcaggaggcagggataggtgtacttcactctctctcctagctgctaggaattctgttacttacatacccagcttttaatcttctttcacttttactaacagaaattcatgtctattcgtattgaagttatctatcagccattttcagatattcatagatactaaactctatgggagagacaaaaagacatgccaaaaactcataaggtttccacacttacttcagaaaagagacatacacaacatacaaattagcaaagtctagacactgtagaaagcaaacgcttaatggctcagtgttgttacagatcttcattgaaccaacgattagattactgagctcagtttgatgttgtgttatttaaattaataatcctttaatgagcaagttctaagtgccagtaactatgctaaatgtgagggacataaagacatgcttcttgcccttaatcgacccatagtttatcgggaatgacacatggatctacaaggaagaatttgaagaaattgtggaagcacagagtaggaagagattaacagggcatggaagaatatgaaaagtttcagattagagatgctgattgtttctgcatttcaaaaacatgtaggtctttaaataatgtgaggacaggctttatcctaaggagaataaggggatcaaaggtgaatcagagagcttataacctcaggaagtttacaaactagaaggggaaataacataggatataaccattgaaaaggaaatgatgtgatccttactttaatatcaatagaggacaacaggagtctggggggagtcaatcaatatattatggaggaagtggcctagtaagtagcttcctaaagaacagtggggctacggagcaggactggttggcatccatcagtgggatttactggctgatatccaatctaatttgttggtgcccatgttacacaggccattaaaaactttgaatattgacactgctttagatttttggagtggtattctaggcagtagcccattttaaaacaaaggcatagacatgaaagttcctatggatactagggagtagttttatttgagtaaattttgcacaaaggagagtagattaagattaaatgacattaggtcttctatgtctttgtatggaatttgagccttatttcacattgctataaggaaatacctgagacagtaatttataaagaaaagatgtttaattggcttatggttctgtgggctgtacaggaagcatagcagcttctgaggaggcctcaggaaacttacaatcatggcggaaagtgaaggggaaacaggcacatcttaagtagctggagcaggatgaagagagagtgagaggggatgttccccacatgtttaaacaactagatctaagaactctgtcatgagaacagcaccaaagagatggtgctaaactattcatgagggatcgatcctcataatatagtcaactcccaccaggccccacctccaatccccaatggcattacaagtcaacatgagatttgggtggggacacagatccaaaccatatcaggaggcatagtttgcttaatatccatgtggtcagtattgcttgtagttatgttgaagaattgagaaacataagtggtcttgacaagaaaatattcattaataaactgaccacttataaaatcatcccattgaaatatcctacttatttaacactagtgtctatcattccagttcctcaattttttgtcaaaccattttagttattgtctgatactgtaactatctaacaatatgatgcaaagtagatacaaaaggattgaaataaaattgcagattttactaatgatgtcaatggatctagtttgggaaacaaatgcatgaacctacttatcaattttaacattgccaaaagaaggacatccaaatttagatgcctcttgatttgatgccctagaaagtatgtagcaccaactattattgatccttaatataaatcaatcagtaaataataacttgactctaatcaagcctctaggtctaattaccaatttaggggatagaagaacaagttaaaagacattacagagatgcaattaacctattttatattgcaattaatttaacagcacaaatgactgattttctgcaatagataaatggcatgaacaaaggaagaggaggaggagtgcaaaactgctacagatttttaaaatattagcaacttaaattctacaaaatattaaaagatttatacatcatgaccaaattgttcaaatagggtttatcccaagaatgcaagtttggtctaacatttgaaaattcagtcaatataacacatcatatcagcgagggaaagaaaagtaattgtatgatcatgtcgattggcacagtaaaaagcctttgataaaattcaatacctatacatgataacatttctcatgaaatcagaggaattcaaggtaattattttaacttcataaaaagcatcttcaaaaatcctacagctaacataatatttaatggtaggaaactgaatggtttcctaataagactggaaataaggcagagatatccatattcacttctcttcttcaagatagtactggaaattctaggcactgcaataaggcaaaaaaaaaagaaagaaatgaaaggcatatatatatatatatatatatatatatatatatatatatatatatgaaaataagaaataaaactatctctacttttagatggtaactgtaaaaattatctctacttttagaggataactgtaaaatcccaaggaatctacaaaagtatcctaaaactaagtgaattcagcaaggtcacaggatacaagatcagcacacaaaaaccagtggtattttaatatgataatgaactgatggaaaccaaagttaccaacacaatatcaattacaaatttctttaaggaaattaaatacataggtatacacttaaccaaacatgtacaggatctttatgctgaacattgtataaagctgacaaaagaaatcaaagaagacctaaatataataaatggagagacataccatgttcatagattaaaatattcaatacagtaaatatgttaattctcctcaaattgatatgtagttttaatacagttcctatcaaaatcccagggaggtctttgtgtttgctagttagttttgatttgttattggatataaaaaacttattctaaaatttatatagaaaggctcagactgtaaggtaaagcagtctcaacaaagaagatcaaaatgtgaagaatcacttgagcagatattaaggattactatttagctacagttatcaagactgtgttgtgttggtagagaagacacatggatcaaggaacaaaatagagaatctgaaagtagacccacacatatattctcaactaattttttgacaaagatgcagagacatttcattggaggaagggtacccttttcaacaaatggttctggagcaattgtacagtaagacttggagaaaatatttgaaaccactgtgtgcaataaaggtaaactattatgttaactgaaaaaagttacagatgttataaataattctgaagtatttacagtaaaataacaagctgttgttagaatgttttgaagtgctccagaaaagtataatagcccgagtttatgaaagtgaattaaaggtgttatgggagaataataaaaggcatacccttgtttgtgggtatttgggcacactaccttaaaggttaaagacagattttaactgataactactgggtgagtaggaggtgaggaggaaaataaaaaggtagaggaaaagagtttcagcagagggcacagcatgtacaaagccttagtgataggaaactcagcaagcataggacatgcagagttctgaaagaagtttaatgtttgaaccctagaatttacagagattagtggagagacctgagacttcgaagataggcgggtcagagatcttgcaccccttcagaagtcagtagaaagccattgggcataaattaagcaggtcagtaggagcgtgagctttgcacttggaagattgtctgggctctttgctattaatagaatgaattcatgatggtggccttgataaggatcttagcttggagatgaagaggaaaggatcaggaaatacgcagaggaagaagtgacagaggttggcgatagattgattcggcatgaggaagagtgagtgaaggatgatagtgaggtccctctgggtcttgaaaaacatgtaggaagaggcaacatggggaaaagagagaaagctccatagaggaaaattatcacaaacaccttgatacaaggcagagataagaggattcagggactgacccctgaggagtccagtcagtctggaatatatgtggaacactcagtcagtaaagtcaagacagccaaacttcacatgaagcaggtaattctagcagtctttcattgaataaaaatatagctctagtatttagggatgcctaaattgagactaagaatctgcagttggtctgcaacttccagctggaagagagcatacatggaaagaaaactatgtttctgttgagtctctagggctatgggctttggaaccgaacagaccagtttttgtttttgttttcttaattttatatgtaaacattcacaccatttagtgtatagatctatgagtgttgacaaatataccagtgacaaaatcaagctacagaatagttccatcatcccataatgttttctcctgctgttcctttgtagtgaaacctctcctatcccttacctttaataacctctgatctcttctccatctctgtagttctgttatttccagaaggtcatataaatagaatcatacagtacatagcttttagagtctgactcctttgtgggccatatggtctcatagctactgagttctgcctttgtactatggaagccacaatatgtagacaaatgggggtggcttgtgttccaataaaactatactcatgggcactgaaatttttgtttcatataattttcacatgtcatgaaaagttattcctttgattttttttccagcaacttaaaatatacaagccatttttagctctcagaccagacaaaaacatgtggcagcctggatctggccctccagctgtagtttgccaactcctgaaaccattagccccaggtatattgtaagtcctgaaaaagataaactacttttattattaatgactttataagttttttgattttcaattggtaattccagatatttcttcagcagagagctgtgttcctagacctcttcctagacctcatcaaattgccagctattcccttcttcagtctctatagaattacttttgctgatagattgactgagggtgacagtttgtctccatttgtctggaacactcttagttttcacctatttaccctgcttcatgcctagtcttatttttattttcaaaggtgtcttagtatacatgataaattgtatggtcaagccagggtaaactcatcagagactacagaagatgccttggtggatgtgggtgtgggtggtgctatttataacagaattctcttcatggggcatgtagaactcttgttctgatcttgatgtcaggtgtggttgtgtttcatttaaaatttcttagatcctttcaatttgtttgttgtcctgtattaatttatctctcctctgagccatgcaacattttttttcttaaggaaaggtgttaaaaatttaatggattttatattctctctgacttcatttatagatgctgaatttaaaatattttaatagtgagtatgcatgtggcacacgtgatgaatcacagtaaaccctttttcactggtttattttgaaagtgtagtagaaatgactccatagcgtctcctctccgctatactacaaataacattttatatttgaatattgggtttattttttggggggcggctcttgttcaacctggctgaggtcaatgatattattatataatatctattctacagatgagattattaagtctcaaagagtttaggtaattttccttaggcacatagttgatgataaagtataaaaagttttgaccagttacttgtaaatcagtggctgttaacccctatgcatacatgacctctaaaattttatcattttttgatggcaagttatttgctgaaaactgtttcccattaggagtaaattagacttttggaaacaatcaaaacactttttcattgctcttacactaaatggtgatttctttttttccaacaaagacaattttataatcttgtttatcaaaggattctacaaaatatcaggtgttaataatattaaaacaaaatagaccattaatgggaatctgaattttgttttttcatagaactttataaaatatgacattttaataatcttaaaataaatttgaccattaacagactgttgcatatttgtgaaagaacttttagaattttgtgtttattggccgtttgaattatttcatttgctttatttttatagtatgtggagtgtacataaaaaaaacttattggtaaatagattttattttgcctttgagtgtaatctcagtaatttgatctttcaacataaaaagaacatttcaaactctgtgctacatgaaatgagcagcacattttcatgtgccaaaaaagttttgagctaagtcataacaaggaaaaatcacagcaattttttattgaaaatatgaatcagctacaatgaagtttcataccagtcattggcttcctatttaaagaaatgttcaacaatccaaatgttttgttttaggcagtttgctttccacacctgccacctgtgcgaatgtcgggtactttcaccagcacatacctcctaatggtaaatgaacagatgatctttttgtgttttcatccattcctccatgctgacattgttagtattttaacattgtactttgctgctccaaaataaacacatcatttttcatatctattcccctcctgttgagatcattaatgcaacataatcctaatgtgttgccaaaaaatatatacagagagctgtctttaggattccctagatttcacatttcatgctactgcaataaatttggagtcagatgctcctggcctaggaagatgataggggttttgtaaagcagtttaaaagtaactaactaaacatgaatattcttaaattgcttttttctttttttttcagtagatagctcttcatttaaaaataatatatacacatgtaaaacattaaagttatacaataaagaggatgtcttcccaccccatttcctaagtctccaagcagcaattgctatatgcctgttcaagcctatgtaagtataggacattttacagtagtaatacaaagaagagtgctcagcaccttacagttttggagattattctgttttagggcatctggctctaattttttacacatatgtgtaataatctatggcataaaccagttagatttcaatgtggttctccagactagcagcatcagcttcactggggaatttattacaaatgcagattttcaggccccatctcagacttgttgcttcagaccctcctgggtggggcagggccacaggtattttaacaagacctccaggtggttttgatgcacagtgaagcttgaaaaccagggcttccaggcaaacagggtctggagtggacctctagcaaactccaacagacctgcagctgagagtcctgtctgttagaaggaaaactaacgaacagaaaggacatccacaccaaaaaaaacatctgtacatcaccatcatcaaagaccaaaagtagataaaaccacaaagatggggaaaaaacagagcagaaaaactggaaactctaaaaaggagagcacctctcctcctccaaaggatcgcagttcctcaccagcaatggaacaaagctggacggagaatgactttgacgagtcgagagaagaaggcttcagacgatcaaactacgagctacaggaggaaattcaaaccaaaggcaaagaagttaaaaactttgaaaaaaatttagacgaatgtataactagaataaccaatacagagaagtgcttaaaggagctgatggagctgaaagccaaggctcgagaactacgtgaaaaattcagaagcctcaggagccgatgcgatcaactggaagaaagggtatcagcgatggaagatgaaatgaatgaaatgaagcgagaagggaagtttagagaaaaaaaaatagaaatgaacaaagcctccaagaaatatgggactatgtgaaaagaccaaatctacgtctgattggtatacctgaaagtgacggggagaatggaaccaagttggaaaacactctgcaggatattatccaggagaacttccccaatctagcaaggcaggccaacattcagattcaggaaataaagagaacacgacaaagatactctttgagaagagcaactccaagacacataattgtcagagtcaccaaagttgaaatgaggaaaaaatgttaagggcagccagagagaaaggtcgggttacccacaaagggaagcccatcagactaactgtggatctctcggcagaaactctacaagccagaagagagtgggggccaatattcaacattcttaaaagaattttcaacccagaatttcatatccagccaaactaagcttcataagtgaaggagaaataaaatcctttacagacaagcaaatgctgagagattttgtcaccaccaggcctgccctaaaagagctcctgaaggaagcactagacatggaaaggaacaaccggtaccagctgctgcaaaatcatgccaaaatgtaaagaccactgagactaggaagaaactgcatcaactaacgagcaaaataaccagctaacatcataatgacaggatcaaattcacacataacaatattaactttaaaagtaaatggactaaattctccaattaaaagacacagactggcaaattggataaagagtcaagacccatcagtgtgttgtattcaggaaacccatctcacgtgcagagacacacataggctcaaaataaaaggatggaggaagatctaccaagcaaatggaaaacaaaaaaaggcaggggttgcaatcctagtctctgataaaacagactttaaaccaacaaagatcaaaagagacaaagaaggccattacataatggtaaagggatcaattcaacaagaagagctaactatcctaaatatatatgcacccaatacaggagcacccagattcataaagcaagtcctgagtgacctacaaagagacttagactcccacacattaataatgggagactttaacaccccactgtcaacattagacagatcaacgagacagaaagtcaacaaggatacccaggaattgaactcagctctgcaccaagcggacctaatagacatctacagaactctccaccccaaatcaacagaacatacatttttttcagcaccacaccacacctattccaaaattgaccacatatttggaagtaaagctctcctcagcaaatgtaaaagaatagaaattaaactctctctcagaccacagtgcaatcaaactagaactcaagattaagaaactcactcaaaactgcccaactacatggaaactgaacaacctgctcctgaatgactactgggtacataacgaaatgaaggcagaaataaagatgttctttgaaaccaacgagaacaaagacacaacataccagaatctctgggacacattcaaagcagtgtgtagagggaaatttatagcactaaatgcccacaagagaaagcaggaaagatccaaaattgacaccctaacatcacaattaaaagaactagaaaagcaagagcaaacacattcaaaagctagcagaaggcaagaaataactaagatgagagcagaactgaaggaaatagagacacaaaaaacccttcaaaaaatgaatgaatccaggagctggtattttgaaaagataacaaaattgatagactggtagcaagactaataaagaaaaaaagagagaagaatcaaatagacgcaataaaaaatgataaaggggatatcaccaccgatcccacagaaatacaaactaccatcagagaatactacaaacacctcttcgcaagtaaactagaaaatctagaagaaatggataaattcctcgacacatacactcttccaagactaaaccaggaagaagttgaatctctgaatagaccaataacaggagctgaaattgtggcaataatcaacagcttaccaaccaaaaagagtccaggaccagatggattcacagccgaattctgccagaggtacaaggaggaactggtaccattccttctgaaactattccaatcaatagaaaaagagggaaacctccctaactcattttatgaggctagcatcatcctgataccaaagctgggcagagacacaaccaaaaaagagaattttagaccaatatccttgatgaacattgctgcaaaaatcctcaataaaatactggcaaaccgaatccagcagcacatcaaaaagcttatccaccatgatcaagtgggcttcatccctgggatgcaaggctggttcagtatacgcaaatcagtaaatgtaatccagcatataaacagaaccaaagacaaaaaccacatgattatctcaatagatgcagaaaaggcctttgacaaaattcaacaactcttcatgctaaaaactctcaataaattaggtattgatgggacgtatctcaaaataatgagagctatctgtgacaaacccacagccaatatcatactgaatgggcaaaaactggaagcattccctttgaaaactggcagaagacagggatgccctctctcaccactcctattcaacatagtgttggaagttctggccagggcaattaggcaggagaaggaaataaagggtattcggttaggaaaagaggaagtcaaattgtccctgtttgcagatgacatgattgtatatctagaaaaccccatcgtctcagcccaaaatctccttaagctgataagcaacttcagcaaagtctcaggatacaaaatcaatgtgcgaaaatcacaagcattcttatacaccaataacagacaaacagagagccaaatcatgagtgaactcccattcacaattgcttcaaagagaataaaatacctaggaatccaccttacaagggacgtgaaggacctcttcaaggagaactacaaaccactgctcaatgaaataaaagaggatacaaacaaatggaagaacattccatgctcatgggtaggaagaatcaatatcatgaaaatggccatactgcccaaggtaatttatagattcaatgccatccccatcgagctaccaatgactttcttcacagaattggaaaaaactactttaaagttcatatggaaccaaaaaagagcctgcatcgccaagtcaatcctaagccaaaagaacaaagctggaggcctcacgctacctgacttcaaactatactacaaggctacagtaaccaaaacagcatggtactggtaccaaaacagagatatagatcaatggaacagaacagagccctcagaaataatgccgcatatctacaactatctgatctttgacaaatctgagaaaaacaagcaatggggaaaggattccctatttaataaatggtgctgggaaaactggctagccatatgtagaaagctgaaactggatcccttccttacaccttatacaaaaatcaattcaagatggattaaagacttaaacgttagacataaaaccataaaaaccatagaagaaaacctaggcgttaccattcaggacataggcacgggcaaggacttcatgtctaaaacaccaaaagcaatggcaacaaaagccaaaattgacaaatgggatctaattaaactaaagagcttctgcacggcaaaagaaactaccatcagagtgaacaggcaacccacaaaatgggagaaaattttcacaacctactcatctgacaaagggctaatatccagaatctacaatgaactgaaacaaatttacaagaaaaaaacaaacaaccccatcaaaaagggggcaatggacatgaacagacacttctccaaagaagacatttatgcagccaaaaaacacatgaaaaaatgctcaccatcactggccatcagagaaatgcaaatcaaaaccgcaatgggataccatctcacaccagttagaatggcaatcattaaaaagtcaggaaacaacaggtgctggagaggatgtggagaaataggaacactttgacactgttggtgggactgtaaactagttcaaccattgtggaagtcagtgtggcgattcctcagggatctagaactagaaataccatttgacccagccatcccaatgctgggtatatacccaaaggactataaatcatgctgctataaagacacatgcacatgtatgtttattgcagcactattcacagtagcaaagacttggaaccaacccaaatgtccaacaatgatagactggattaagaaaatatggcacagataacaccatggaatactacgcagccataaaaaatgatgagttcatgtcctttgtagggacatggatgaaattgggaatcgtcattctcagtaaactatcacaagaacaaaaaaccaaacactgcatattctcactcataggtgggaattgagcaatgagaacacatggacacaggaaggggaacatcacactctggggagtgttgtggggtggggggaggggggagggatagcattgggagatatacctaatgctagatgacgagttagtgggtgcagcgcaccagcatgtcacatgtatacatatgtaactaacctgcacattgtgcacatgtaccctaaaacttaaagtataataataattaaaaaaaaaaaaaaacagggcttcagataaaccatattctttcaagaatcatttaggttgtttgcagcctttttcttttgtaaatagcactgcagagaagatctttgtacatagacctttatagggagagtcatagaaatttatcaaactttccaaagttacaccaatttacattttcaccaacaataatgtatgagatttttcttagtatttctgagaccatttttcttagatttccttctatgttttataactgcaagattaaaaaaatttgttttgtttcgactttatataaaaaacacatgtattttttaaatgtttcaaatatttacaatgcagaatataaattctttcctactaaagaaatatagctaccatttattgaaagcctactgtgttttataaacttaattcatttcattttcattagcctcccagcaaaggacaattcttgtttcttaggtaagggctattgggaggataggctcagtttgattcattatcttgctattaaatgattatgtaactacatatgatcataacaaattattataaaaataagaaatgtactttaacatgctttttgagaaatatatcattaaattgccttatggtccagaacattaaaatacttcttttgcttcatgctaaggttcccacaatattcctgtgaatgcaaagtttctgtgtagatatttttgaattactgtataacaaagtattcagctattcattctgagtatttgatagaaaaccaattaatgccaagtggcttttggtaaatgtctggattgaaatgacttcagccaacccaggcttacaatttaatgaaagctgaggtgcatcagaaggttttcttgcataatatataaattaccgctttctgcagtttcaaaaggtgtggtcctcagatcactggtctgacttatctgtttcttatttttatatgtgctttatatttaatagatccaaaaccccttccctaactacagaatcagaatttttaggactggggcctggaaatttgcacttgaaacatgtttcccagctgattattataaataaaagtggatttcattcttctctttatcaaaaacaattgccattttttttgattcagcagagatgactacagagattagtgttgtaaaagagtacataaataattcagatttaaactctgtactgcagtggtatgatttacttaagactcagaacctcctctaaaaatgattaatttaatttttatttcttttcttttactttgtcttccttgtggcaggatgtcagttggcaatgaaatggccccagagcaggcacaataagaagccacaaaaaattacattaatttttattatataatacttagatatttctttatgatttatactcaagggcttctgtaaagacctgagttggcttacagaaggaaattaatataaaataggacaagcacagatcaaaatagaaggagactatttaaaaggatttgaggcacctgggagacattaattctagcagctgggaagtgtcctgatcgctgaaaccaaaatggaaacatgttggtttataaatttttcatcttggatatagaaagtatatacaattatcagaagaggcaaactttttcctacaactaggtaaagtatgaatgtgtggtatatagtgatagatcttgtataacagagaaaacaaaaactgtttttcaaaggatatagaaaaatagttatgaaatggaccattctggtagactctgagggcattttattaaacatagccataaaagacctttttgtttgagctgatactttataataatagcaaatatttattctgcctctgtgtatgttattttgttatcttcacaacccaataaatgtatgcaacgttgttctccttgttttatagttggaaacctgaggtgtgtgtaggcaagctaaataatttataagttcctcaggttagcaggtgtcattctgtctttagagctagtgttattacactctacatgctacatacttgtcagatatttctgagttgtttgctttgtaataacatgaactaaaataatacaatacacattttggagaataaggatgaagagtgagttcatgtttacatcatcatagtctcttttattttctaggccaagacaagtgtcttaatcacattatctacatagtgtcatgagataaagcccctagtgtccagtagttctgcttttactctatgttgttggttaaaagaaacttatctacttgtttgtcttgtttggcaacatacacaacataaaatttgtgttcagaatggatgtaaacaccaaaaagatgaaattatagtcctgctctcaactagacactgggctcccctacccatgggaaatccatgaatcatattgagtaagtgtatgcatacttggttaaaaaccttagaattctgctgcacatagcatagaagacaaagctttaacctggaaaatcttaaagcaggtgttcgcagctgagtgtctcatccataaaatgacatcaggcaacggtctacatggatcatccaattttaagctgggctgcatcctgatgggtctgccagaatgagttattcccctagtagctgaaaaacattgacctattaagattgtttttatctgcttatttaaaaatggttcatgtttttacatagagcaattttaacctggggtccaggtgagtcctgcccttactcttagcaacttagaacagagcgggcccttatgaactctccacctcagggatgataacatctgcatattatgtcatttgtcctgtgtgagagagttaatggtaaatcttaaacttgaaaataggacaggtggtgagggtatcatcatgccatcactgaaatcagaaagaaaatctcagacctgttaactaaattcaacttgacatgttttggagagcatcttagtaggtcttattttccatgcaattgctctttcccttcgttcacttaattgacaagagccatcttttcaaccaatgaaaaatgcatattgggctagatgtcttccttctatttcttccagatccaccttccactctgccatatgtcccaggggacccatatggattacatctcttgccttctggcttttgggtggttttagctaatgggaggcaatagcaggaaattggagagtgggaagagaaaaggtcaggatatttgttcccctggcttcctccctgctggatcaccatatgttgttcagtagtcctcctactggaggccacagctcctaacagtattcctttctgtacagctgccctctctgagttctgggaacctcacttctccttactgttcaagcctaagtatggtgatggttccccactgtcaccagccttgcaatactacatcattctttttggcttctttatatctttctcattgtcaggcgctcctcatttaccacattgaagtgtgccatctgtacactgctaggagactgatgaatacacatctgtgaaatagtcgtaaatgaaacaaagaaaaacgtctttgaaacttttcaactattttgtattacatccatatataataagacctcatatggaacatttgtacagaacatattagggagaaatttattgccatgacctagaatgcaaatctgtcagtctgactcaaaaaaacttataccctatgaccctgatctctgggaatgcatgtaggagtattttggcttccagaagtaaaatactctagggtagcactgtccaatagaaatataatgtggggccacatatgtaacttgaaattttccagtagtcacattcaaaaaagcaaaaaaaaaaaaaacaagtaaaattaacttgaataatatattttatttaactcagtattattttaacatataatcaatataaaaattattcacagaattttttttctgtactaagtctttgaaatccattttgtgttttacagttaaagcacatctcaatccagactgctacatgtcactggcttagtaggcacatgtggctagtggctgctttactggacagcacagctctaaggtttatgatatcaacatttagtaaaagagtttctcctttctacacacacacacacgaattatattgtaagctattcccctgtcaatctcaataaacctaaagacttgcctatctgcatatctaaatgcatctcttttttctgccacaattaatgcatgcaagtcacttagaacagtgtccagtgcataataaaatttcacatatgctatttttgttgttgcttcttaaaaacctcctgaggtagttcaggtacgtattactaccatcttacatatgaggaaactgagtcacagatcaagtaagcaactggtccagagttacacaactattaagcatcagatcatggactcaaggccagttcttctgactctgcagccagaagaatgaatgtaataaaagtcaggcagctgagctttatgggttcgactagtgatcaggaggacaaagatgtggcctttaaacagtgctatcatgtatggttgtgacaatgaagtgccgcacaagtgccattcacattactgtttctgtgaatgataccctcttgagttgtgcagtgcacaacctgtgaagtcctacgtggcagccccaatttcaggtttatttctgccaaaaactgagtttagacaaattgtgaaaccttcccatctgttttctttaaacaccaatgaagaatgtttgctgatgctaccacagcaatcctgtcttgtcctgtgattcttaatgatagtgcacattcttttctactagcattcttcatttttgttccatttgatttggcagtgcacattaagaggctatatgaaatgcattactttccaacttcatgccttagtaatgctatgtttgcttactgtcatagttaaataaatatcttattaaagcatttctacttaatttcattgattctggtagaaggctttcataaaacaagagcattttgggaggccgtggtacatggatcatttgaggtcaggagttcaagatcagcctggccaacatggtgaaaccccgtctctactaaaaaatacaaaaattagccaggcatggtggcaggcacctgtaatcccagctgctcgagaggctgaggcaggagaattggttgatcctgggaggtggaggttgcagtgggcggagatcccaccactgcactccagtttgggcatcagagggagaccctgtctaaaaaaaaaccaaaaacaaaaaatcaaaacaaaaaagtagttacaatgtttctatatgttattgtcagaagactatgaaattttagaaagtgttgcattgcaaacatcgtgtaacctcctaactaaaatatatcattagtgcattaaatattgtgaatgccattagtggcatcaatcatactgaaagacagatattcagtggagcaataccgcagtagttgtctagacactacatactttactgaagtgattctctttgctgacttcaggaaaaatagctgtatttaatcccttcaagtctaggaatttttaccatcttttcatattaggatgtgtggcattgtggggaagagattttggtgctacataaaaatattcataattatttatatttcctattttctaatcttattcatttgtggattttaattaagattaatatttttatggttgataatgtcctttaattgaacagtgaagaaagcccatattcagctagtacctgatagggttataattgagaaaatttaagtttttgctgaaaatgcctcaattaaaatgattttcgtaggagtagaccaaaccttcattaaactgacaattagaaataaagctatcccacatttagtttaaagtaccagtttgggtagggaaaggggacaccaaggcaaagcatctttgcttgaaacaagaaagttagcattgttggacattaaaaaaaaattatgtcatgacctagaaacttataagtaaacaaggaaggtctattgtcaggtagatgaaaagttctgggaagaaatacggaaagcctttcccatagctttctggaaaatatctactgctcaggccctctgaaatataaatagcttgtgtgagaggtgctgaagactttattagtaagcaccccttctaccctagacataacattttcacttgttttatttattcataatattattcaccacttgttatgagttgaattgtgcccccaacccccccaataagagacatgatgaagtcctcccccaatgcctcagaatgggatgttgtttgaaaatagggttgttgcagatataagtagttaagatgagccatactagagtggggtgggccactaatccaatgtgattggtgtcattataagaagacatccatgtaaaccggagacacacagggagaatgctacgtgacaatggaggcggagattatagtgatgcatctacaagtcaaggaacaccaaagtttgccagcaactaccagaagctagaaaaaggcaaggaagaatccctcttctggtttcagagggagcatgatcctgccaacaccatgattttagagttccagcctccagaattgtgagacaatacatttctgtttttttttaagccacgctgtttatggtactttgctgtggcagccctggaaaactgatgcaccacccactaagtattgtgtcttgaccaagagtttcttgtcctcatgaagctcacaaagtacttaaaaatgctatgctctgttaaggaatctattaataacgacctcctaggggaaacaacacctaagttgagacttgagggattaatagtagttagccaggtggaaagagtagaggaaggaaggcctgagaaacagaaaagagtgtgtcctgtgccatagagggaaaggacttccatctgactgaagtgcagatgtgccacaggggatggagagatggtgcagagagaaagatgggactcagatcattctaaaccacatcagccatgcgaaagagtttgggttcatcttaaggctggtgggcagccactgaaggaggggaggggcaggattggacaagtgtgtaagaaagatgaatctggccacagttggtagactggatgggaggaatatgagactggtcaggaggacaggttttcatttgtgcataagcagcatgtttggacttgaatactcatcactggaatgaagcaggaagtaggtggtgagatggaaaggatccaagggcccagaaggaagaatagagccagacaggctagggactgcccagggcttcccactgtcaagctctggaattacagctgtctctggtggatgaactgcttggtctgtgcctttctttactcctccaaacccaggaccttctccttaaagctgctactgtcctccttagggttgaaattctttccttctcctccaccccaaggccttcccacttgcctttctgattaaacctgaatgcaaataagtatagaatccaggggaactgaatgcagggatcttgttttgtaacttcttcattggaggcagatattgaatctataagcatattgtttaaggacatgggctgtggagccatgctgtatgggcttaagtcccagatctgtcacttactgtgtgaccttggacaagtcacctgatgtgattatgcaacagtttcatctccaaaacagagaaaaataaaagtacctcctaccaggattgctgtgagagtcatgctgtgaattaacttatgcaaagaacttaaagaagtacttagcacttagtaagatccaattaaatgtgagctattattatagttgctgaatctttgcaccacccatggagctactggggaactcacctacaggcttgtatgttagccagtccctatagatgggttatgcatctgaattaagattgtggaaataaggtaaagaggaagacaaggattttagaaatacatgtaagagaaaattaggtacttgattttatgcatgaaaaatttataaggaagaaacaaaaaacgtgctagaccttaaaaggtaataattatttttcttagggtggaaagcagaggaagaagaccatcatgaaacagaatttttaaagtgtgaataaaataggctattattcgataaaaatgaggaaggaagggtgttatcggcagcagccacagtatgtacaaatgcaagcagagctgacatgtttagtgatagaccttagcctagaaaaagagaaagatactggaggtatttagccagaggagaagagactgatttatggtggtaggccaccataagtataaataactcttagcacatgggatataaaaataatctctctctctctgtgtgtgtgtgtgtgtgtgtgtgtgtgtgtacttgcatgcacttacctgtttgtttacaaggttaccttgtcatctaacaattagatttctgtgtatcaaggggaggtttcagaaggcagacttaggttaaatggagaaccccattttcaatctattttactgtaaaagccttctacctcagtatgtaatagttatgcaaaaaatgaaattgaatggaataggaacatagagacctttatgtgtagaaagtcaagcttatggaatatatacttgtatagaaatattttctatgagaatggtaacctaatttgtcatgttagctaaatgcaaaagataatttattttataggcagcgattttatacataggattgatggagtgcatttctcctgccagtattgagatttctggcattttcaataaacaaacagggccaaaggataataccacccatttaataagttggtacatttattccaacagacatatgtttagatttgtcccattttcatctcattttatcctccacatcagcacagttgccctaattgctttctaatttgtatacatttttgcacttaaaaaatttaaactaagaaatctttttcaagggcttcttaagtaccaaagggtggggttctactaaactaatgtatccatgtgtcaaccagcatcctgtgtaatgcatttctgaagtacaaaattgcactcattgctctcttgctgttggcttattctggatctcagataaaacttataaagaaaacaagtagtatggatttatgcttgtttacttagccagagaaacaaaggcaaatgcatattcagaggtatactgatagcgatgtttccatggaaacaaggatgctatcataatatttatttccatctattatgctttagtgtattttggggtatagtgttaaaatgataaaatatatgactttcttttctcaaaaaactgtatattaggttgatgggttttttctgggttagatgtttttaaaggcctatgtcatgaaaactatcaagagtcacattaaaacatataattttaattattccccataagttataaattacattcatttgcttgcttataaaattttgaaattcagatacatgacacagtaagtctcacccaatgttaaagttaggggtaaatacagtcatccttaggtgtccatgggggattgtttccaggactctcatggataccaaactccagggatgctcatgtccctgacataatggcatggtatttacatataacataggcacatcatcctgtatactttaaagcatttctacattacttataatatctaataaatgtaatgctttataaattgttgttatgctgtattgtttaaagacaaatgacctaatgcatatgaggcttaaaacctagatgacgggttgataggggcagcaaaccaccatggcacatgtatacctttgtaacaaacctgcatgttctgcacatgtatcccagtacttaaagtaaaaaaaaataaataacaacaggaaaaaaagtatacatgttcagtacagacaaattttttccaaatatttttgatccacaattggttcaatccaccaatggggaacctatggatacagaaggctaactgtacatgcatttctctacattccacagttatattttatgggagacttttttttttttttgctatttgctttttaagctttaagttggcgattcaagagatctgtagcaggagaacagaaatcaactatgcaaggtagggatctaagatattattaatctcccaccaatggacatatattacttgtctcatgtaagattaatataggggtataagagagtgagatctcttattggaatcacttaatacatctatttatgtactaatatataatatgtgcgaagcagtgttttctgtgctcaggatgtaagaatgatctggaaaactgtccatggttttgtgaagcttacattctagttagtgggggagatgggtactaaacagacaaaaaatgcaccacagaatattatacaaaatttgaaaaaacttacaggaacatagggttataggaagtgataactaatggaagccagttatacccaaatatggtgttgtcatatacattttaaaagctttgtctcatttatcattgccttgggtctttatatcaaacctcagggggttcctgggtaggtgttattcctagttgctgagaaagagaaaccaaggaactgcatggttaaggaaccagttggccagattcagaaggtcacaacacaggcctttttcactcagctttgtaggcacttaattagagttgttgaataaatgggtgaatgattgaaagaatgaacatacctaaatacgactttcaaattggacatattatctttttcaccttttgtaggtgaagtttctatggactgaaaaggaatcaggagcttaagctttaatttggttgtgttgtttctctgttttctccctgttagaaagagaatgtgccatcagcctgcctctgacacttaaccagcagtgtgattttaggcaaaacctaatctctcttgtccttggtttgcttatgtaaatattgggaataacaatatcagtattgcccatttcacagatttttttagtatcatataagatgaaatatatgcaactttagatgatcatacttttttattttttggagtgcagtggctcaatctcagctcactgcaacctctgccttccaggctcaagagactctcctgcctcagcctcctgagtagctgggattacaggcatgtgccaccacgcctggctaatttttgtatttttagtagaggtggggttttgccatgttggccagggtggtctcgaactcctggcctcaagtgatctgcctaccttggcctcccaaagtgctaggactacaggcatgagccaccacacccagcctaattgtacatattgaagtcatcattgatcctttaaaaagtaatcttcatttcacttgaattagagaagcattttttccagatagttcataaaataatctttgatgtccctctcttattttgatgaaaatcaaattaagctaattaacctaattagcttctttttatataagaagggtactctttgaatgccagatcacaggagttctcaccacctgtgaactatgctattactctggaactaagttgttgcagggtgaagtgttaacaaatgaactattttgtaagtaagggtaaggattctgtgttcaatatttttgtgttgagttaggagaattattgcatgtgctaatttatttatatttttcaatattgctataattgatagaagtcaacttgtaccatcttatgtgcattgcaaaaatcacacgtgtcttaaaagcaactattttatgaaatttctaaacagcctcaatgactaatatatttagccaaacacagatgctaaatatcaagagctttaagactctcgtgttgaattcaacaactattattaaataactactctactaactagggggaaggaagagaaattatggtgttcctggagagacagacatgcctataaaaagcaagaggataaatacaggtaaactagagtagttgttgaaggcctcaaaggagaaagcaataatttagctggacttggatgacaaataagtctggatagatgtggctaggaaaagacacagggtttatctttgcctagagaaagggagcaacatgctaacacttattgagcacctaccgtattccaaaaactttgcatttattttctcatataatcctctcagctggcctctaacacgttatgttatcttcatttttcagactaagatcctaagtatcaaagtgtctaagaaatttgtgcaaaatcacagagagattcaatcacagagtggtggatattaccactgaagtctaactgcaaattctttgctgaagaaaccactgagacattttaatctacactattaaaaagttcttaaaaatgtttgagtacataattaagataactgcattgaagtggtataatttgttcccatattcagaataatgtcattttatatgatctctttgtttccacattggaaaggagatgttactaagtgagaagaccaagtacatctttgtataactaatggttaaaactcctctatggcatacccagtacagtggtaagttttttaaatatgatattgtgtaatagtcttgaaaatacagctttctttatttgataatgttttatgtgagaacattggctttttctgttgccccattgaaatccttttaacatgtactttgcacagagattttctaaattatctccaaactcagatataccacctggaggtcttcatttcaaaacaaagaatgtgattcatgctcttgccacaaaaatgggaaaaaaaagtgtagttttgatggaaaaattctagggctatatatatgtatatatacacacacacacacatatataaacacttgaagtataagaaactcttttaagaaagcaaagatttagttgactcttcagtttgtagtaattgttcgtgttttaaactttagtattgtaaaattaacatccataatcaaatagggagagtttttgttgttgttatgtgtttttcctagaatagatactttagaagagcaaaactgtcagtagcagaaacatgggtttttttttatttttatttttttgagacagagtctcgcgctgtcacccaggttggagtgcagtggtgcgatctcggctcactgcaagctctgcctcccggattcacgccattctcctgcctcagcctcccgagtagctgggactacaggtgtccgccaccacacccggctaattttttgtatttttagtagagacggggcttcattcaccatgataaccaggacggtctcaatctcctgacctcgtgatccgcccaccttggtctcccaaagtgctgggattacaggcgtgagccaccgtgcctggccagaaacatggtttttaattttatttgtttgatttagcaaatgagcattttgttttttactttttgctaagtacagaaggggttttcttatttgatatagtcagaggcagtactctgttatatgaaaaattgttttaaaacaggtaatcatttttaaaaggtatatagataccataaacaagtaattttgctttgagtatgcaactgtgtgtgttttttgttttgtaatgtgccaagcgttcttctttgagaaagggttggacagtaggagttcactttattatttatataagccacactcattatgaattttctttgatttccaattgctgttttactttgcaattgagttatttaaaaaatatttctgaaacaatctgggtacagaaatagaataaacagaatgaagatttttgttttgtatttccagcttttatggttgtcttgcccaatctcttttatctaatttggcactggttttggggagaggaagggtgactctcctttattgagcttttcaaaagcctttatatttgtttttatataaacaacatattccttttttcatattcatatttcatcacttttttggtatttttctaataatttcagtgaaattgttactagcgtaattagttttgttagcaaatacatctaattgaaatgatgaaagcagaagggcttgctagagagcagctaccaggcacaagcattctgtttgccctggacaactgagagtgccatggagggagtggatcgtactgcttagattgaggccatctgtactgggtaggtgtggtgtgaggtctgtggaaggcgacaaagggagctggagaaggatcatgccctcagccttagccttactgagcagacagacctaaaatgcagtttccgtaaacatccaaaatgttcagagaaggtatctttcacataggaggggtatttttagttagaccttgaagattattagtaaatgtaagttgaaaggggaaggatagagcataagcaaagagttagaatcagaaatactctaagtgacagagtacgctcgcttgtccaaataccctgaacctaggcataaacttcatgtacacatgtatatgcatacacatctgttgaataattgaatgaatgttaggacagagaatgtggactttatcatcttggcagtgggaaatatgtgtataggcgttttagcaggtgttagaaactgagagtgtgttttataaagaaaactgaactctgtgtgtagaggatagatggattggatgggaggagagaggctgcaggcggggagaccagcgtgagggttggatggacctattgcataatacaaagacaaaaagaactggacttgaaatcaatgggactggatgtgatctcagctttatcagttattgcatcatgttagtcacattccaaaatagctttcagccacagttttctagaaaatgcaaagttaatacttttaaaatagaaattttgtgaaaaataaatgtgttaaattcaagaaaatctctatcacagtgtctagcaaagccatccatctattaattccttcatatccccatttactcagtgtggatgaagcatactcttatgacttcataagagtgtaatctaaggtgtaaaagccaaacaagtatatgggcccatatgcctcatatgtgacagctgaatctgcattacaaaatagttccaggctcagtgtggtggctcatgcctgtaatcctagcatttcaagaggctgagacaggtggattgcttgagcccaagagtttgtgactggcctgggcaacatggtaaaactccatctctacaaaataatacaaaaaactagctggggatgttggcacacaactttggacccagctacttgggaggctgaggcataagaatctctggagcctggaagggagaggttacagtgagctgagatggtgccactgcactccagcctagacaacagagcaagaccctgtttcaaaaattaatttaatttaaatcgttccagtaaaattaatatgatggtaatgcaaaatcagagataaatgggaagagaaagactgggttttgcggaacaattaacttgatcaaatttaatgtattgagcaaatgtaggaaaagaaagagccaaactggttgtgggagtctttgagagaataacaacagggaagttggaagaggaactgtattagaggaaacaccaagaacataggaaaatgcagtgtcaaatatgagatggcaattggacatccaaaaaatatctgaaatgcatgcagaaaatgaatgttttgaatcaaaatttgatggacatatcattgatatatacacagtggtaggatcttgagacttggtgagtttcctgaaagaatgtgaagaaaagtgatagtacctatcatttatttaacatttataaattaagcagtgttttaagtaatttacacgagttatcttatttcttccttgcaacaatagcagaggtaattgctgtcttatccttaatttactgatggggaacctgtggatcaacaaatgaagtaatatgccctgttcaaatagctagagagaatcagccaagggattgcacctaggtttgtctgactccacaggacaaagacttgacttcaacccaagttaaaaattgaaaggaaacagatgttcatggacctctgggggtgggcagtagagcgagtgttcagaaaagttgggcatgagatcattggaagatgtgttttatttttaagatggggtgaactgtgcatgtttgaaaaactgtaaggaagacaaaagagagatggaaacaggaatcgttatgaaaccagagactcaaaaggaaaaatgaaaccttgtacttgtataattgttttcatttttcaaaaggcttacagatctgggatgctaaggttcctctcttgaaaagccctgtgaggttcaaagagtggatattgtacccactttacaaatagaatgtgtgaagacacagggcaatcaagtgacacacctatagatctgcaggcctggattatggtcagaatatcctgatgttctaattcctgtgttctcttcctaaatttcactagtagaaagttaggaactctgcaatgcagacaccaataatttaactttggtgggaagacccatgatggagatcctaaggaaaatgagatgatggatgcttatttcagacattctttgatgacctacacaatgccaagaaatatgtgacagtctagagatagaaagatgaaaatgacaaggctctaatcctggcagagcccccagaatagaagaacaaggtgggaaaatataaaagtatagaaaataagaaagaacagcaataatttcaaaggtttcaaaaaagagatgtggccaaagctggtttggaagataaataaaagtcttctgtgtcagtggaggagtgggagccttatgtgcatggcatgggctagcatttttgtgcttggggaaaaggaaaagtttgttgttgcttagtgtatgtggctgggagttgacagtgttggagcaatgtatgggaggcagatgaagctgaactatgaaatacctatgtggaaaggtcttgtagagtatacttaggtgcttagggtccaccctgtgcctgcattttccaggttgtgtttcagaacaaaacaacagatcctgaggctgttatgatcttattagatgctttgctacatttcctaaatagtgttagaaaaatacgaaatacttcagtctctgcttggagacttacaatgcacacctgttttaaaatctcgcaaaaggctcaggcttaaggaaaaaatctgtttgtggtagacattttttgatgccctgtatcacacctctgattcccacctcccaaagcatttgcagagcgggtagacagtttcttgcaggttcatagtagaagctctgatggagatgagggagttgttgctcccagggaaattcctccactattggggttgggagcctgtgtatacccccgactcccatctttcaaatggatgattctggatgacattttgtatggttgtcagaggttcatttgaaatcaagttctcattgactgcagtagcaatttcgataatgtacccagatgttgaattttcctccatctctcccctttccttccccactgcctctaagatcaccccccataaactatgtcacccaagtctttttggaggctctggcttgggagaaacaaaactaaaacactattgaacttttgttgaataagctattatttttcataaggataaagttttgttttcctaagacacactttgccatgggagagttttcccttagggggtttatacataattaaatgttttgagaattggaccagcaagaaagggaacaaaaaaggaggagacactttgaatttgggtgttgggaaatagagcaagaaataacgaaaataatgattgagttttgaacatgctgataccgaagataactaagagtcagttgtttatgtctaatattccgatttaggagatcttctaagtgcttctgcatgtgccataaggcaggaagaaaggtgtggtcattcactgagctgggatttttttatttttgtagtgggcatgctttaatgagatttatcaactacttgaaactttaccacttgattgtgaaactgaatcgttgcatgggattcttttttatagcaagcttgtccaacctgtggcctatggtggcttcgaatgcagcccaacacaaatttgtaaacttttgtaaaacattatgagatttttttgtgattttttttttttttttagctcattggctcttgttagtgttaatgtattttatgtgtggcccaagacaattcttcttccaatgtggcctagggaagccaaaagattggacaagcctgacttacagtaagggtgaaaaccataactgaattgcagtcttgattttgattgcttttctgggtatgttcattgggtttcttcttagcttttgcatggcagtgcacaaatttcttttattggcagcgacctgattctttcaaaggcaatcttgtcatttacactgttcatgtaatgatgtaatttgataactaccaatcactaagcatttcaacattaaacattaaagacgtttaagatattatgtatggaagactattgcattgcctgtgtctgtgttcctggtacaaattatcactactggatagtatttttcattttaattgaagaggtaacacttcacctcatagcatcaaatagcattgtgttatacaagtagtaaggctcacatccagttttcaatgacaatgatttcattcgctcttcatgctgtgatcacaagtagatataaagcattttgaggcagagctcttcagtttttaaatgttgagaccatttagtcagctggccaccatttcagatatattgccactattatgttacattttagttcttttagagggaaaatggcttgttttactttgcagtctcttattgacatcttttttaatatttatgtgcccaattgcacatgtggccttttcagcatttcccataaaattgtctacatagaattatttggtcaaatacatttagaatactctataatatccattccactttagtagatattatttgtccatagtttatattaaggtccctgacttattctgcaaaaagaaactcatttaacttggcttgacacaagtttactcaaatttacttgttgggaaatggtagtcattcttctggttgattttaagtcgtacagagacagacttgtgcactatacccctgcagttataccaagtggtatttcacatactctgcttgatagttcactacctaggtcaattcaggtgagaaaccaacaccaacaatatgtaggaaggggaaaaagattgagcacagaatatcagaaaaaaagtcagagtgaccccagtttcttttctccatatgcattgatggtttcctggagttttccttgctactgcatgggaagatcaacctgaagtgcagagcttggataggcaatagaaaacctggcccaatatagaaaattaacagacgtgtatcaaagtgaagacttttatacaccagaaatggtccatgtgaatttttacaaaaagctagtcacaagaaggagtgttcttccctaagggctctgcacacctttctttgatgttgacttcggagatactggccccatgttgtggctggagctatgggctctggtagagtagcacacacagctgatggccagaagcggggtcagcaagccacttctatcctgtaggtaacgtgggggaagagaaaataaaaggaaataaggaaatatgaggaactggactttatctttgcttgcttgcttattattttttaattcatatttccctggtttatacatactcattgtgtatgtgtatttagttctaattttatcacatggatgtacatgtgttgaccaacacagtcaagaaagaggacagttcaggtcccacaaggatccctcatagtaccctttgataacgacactcccctatctccctccactttccctaaacattggcaaccactagtttactcccattttgtttttattttaattttttaagagatggggtctcactattgcccaggctggtctctaactcctggtctcaagcaaccctcctacctcagcctctggagttgctgggattacagttgtaaaacaccatgcccagcactaaaccctatttctaaatttgaattttttaaagttttacataaatggaatcatatagtaagtaaccttttggaattggcatatttcagtcagcataatttcctgaagatttaccaaaggggttgggtgtataaagatttcattgctttgagttgcagggtagcattccatggtatggatgtagcactgtgcatttagccattcacacattgaaggaacttgggttgtttccagtttagggctgttagacataaaactctgcgaacttttatgtacagatttttgtatgaacaagtgttttcatttctctaggataaatgcccaaaagtgcaattgctggtcatatggtagttacgtgtggttcgttttacaggaaactaaaaaacatgttttccatattggctttgacattttacacttaagaagacaatgtctgaatcatccagcctccttacatcctctccaagatttagtgctgtcactgttttgttttttgtttttaggtattttggtaggtgtggagtgacagctcattgtagttttaatttgcatttccccgatgtctaatgatgttgaacatcttttcaggtccttattttccatctgtttttcctcttcagtgaactgtttgtgtcttcttcccattttctaatggaatcgtatgttttatactattgaattttgggcagtcttacttattctagatactctttctttagtggataagtggttttcaagtatatcctcccagtctgtagcttttctttacatcctctttgcttgagctttcatggagcagaagttttaaatgttgatgcagtctggtttattggtccttccttttaaagaccattcaattggtgtcaagtctaaaagctctttgcctatccttacatcacaaagatggtttccaatattttttaaataaaagttctatagttttatgttttacatttacgtttgtggtctagtttgagttgatttttaaactgagtaaagtttaggtcgatttttttttttctctccttccattgaattgcattttttcaaaaatcagctgagcccatttttgtgagtctatttctgtgttctctgttttgctgtatggatctatgtgtctctccctgtgccactaccacatggtcttgatcattgtagctatattataagcctcaatgttaggtagagtgattcttcctgctttgtttttagtctagatagttttacacattctaagtcctgtgcctttacatataaattttagaataagcttgtctttatctacaaaaaaaaaagaacaaacccaaaaccatgctgatatttcgatcagaattatattaaaattatacactcatgtgtcacttaatgacagggatatgttctgagaaatgcatcattaggtgatttcatcaaacatcatagtatgtacttattatacccagatggtataacctactacacacctaggctgtatagtatagcctattgctgctaggctataaacctgtacagcagatcactttacttaatactgtaggcaattgtgacacaatggtgagtatttgtgtttctgaaaatatctaagcatagaaaatgtacagtacaatataaaagataggaaacggtatatctatactgaacacttaccatgaatggagcttgcgggactggaggctgttgtgggtgaactggtgagtgagcggtgagtgaatgtgaaggcctaggacgttactgtacattactgtagacttcataaacactgtacacttaggctacactgaatttataaaaatatgtttcagtgataaattaatcttggcttactataatatttgtatttataaacttttaatgttttatgaattttgacccataataacacttagcttaaaacacacattgtggagctttactaaactattttcttgtacacttattcaataagcttttttattttgttttctttttaagtgtttttgccaaaagcatttaaaaacacacgttaacctaggcctacacagggtcaggatcatcagtatcactgtcttccacctccacatcttatgccactggaagatcttcaggggcaataacatgcatggaactgtcatctgttataatgacaatgcctccttctgaaaaactcctgaaggacctacctcaggctgttttatggttaaccttttttttttcaatttatagaagtaatatattctaaaataacaataaaattatagcatagtaaatacataaacccgtaacagttatttagtatcattctcaagcattatatgctatacataattttatatgcaaaacttttatatgactggcagcatagtaggttttttacacaatcaccacaaactcaggagtaatatatttcactactatgtcatgatgcctatgatatcactgttgtaaatatggtctggccatatatgtggtccagcatttaccgaaacattgttctacagcatatgacagtgtattaatttgggaagaacagcaattatgttgaatctaacaatccatgtacatagtatgtgtctccatttatttatgcctctgcattttttttctttttcattagcattctgtaattttcattatacagatcttctgcatgttttgttatgtgtaatttacctgggtattttattttatttggaacaattgtgagtagttttgagtttttaatttcaatttttgcatgtttattattagtatgtagaaattgtatcctgtgacctgcttaactccctcgaatttctgatgttggggagggggaaagcactcggtctttcaccattaaatatgatgatagctgtagttacttgtaggtgttctttatcatcttagtttgtttttaaagtccaaaattggactatatatagcttgacttacatttgggtggcacatataatcttccactagatattttaatgatctgaagctttttagacattgacactactcttttctcatagttcctagtgttgcaaaaaaggagaaaagtctcgctataccttgactgtaacatgtatgttcttatgcatctatgttgctccatctgcctcagaaaaatgcccaccctggccctctgactgctactactactgtccgtctacttggccaggttctgcttgttaaagccttggttacacctgtagattaactatgcagtcctctgtgtacttaccaccttttcagcaaagtgccacttacaatgtgccattacaattaagttatttttctttgcttcctgatgctacgtccatgaaccggccatatcagatatccagaacaatattccttgcactcgtgcactgcagaaagagtagccatgcttgtctctagaccaatgggcagatctgtgccagctatatttgtgcttaggcaaaagagattttacctttggaggagacattactggtttccgtagaactattctatacatttttgcatattctagctaaaatcagtgatagaaaacatccacactgtgaaattgtatggcagaagataacaaggaattagacaggaaggcagcaatgatgacacatacttgatcatcaagaaataatctttggaaattccatgtataagctacattctgatatgaggtactgcctcatttagccattgggaaacatttggatggtctagttttgcagttctaactcagttagttacattccaagagacttaatgttttgagaatgttgcattttagttagatttaaggtgatacaacgctatgttattgtatcatttctgttggatagcgtgtggttaaaataagtccatcaactgttttttcttcttttctgggcacacacaagagagttttgctgaatcactttactccatatttataacctagcaatttaatactatttttcagtaacaataacgtgaggcacataggccctcttatttctctctgatatactgctatatgatccttagagtatccctaagtgtctacaggttctggttttatcaatttgaagataattattttgctttttatatttttcaaagaaaagttgaaaatatccaagttgtattctaaaatacatatactgcttcactgtgtatagacaccacttaggtaatttatatcagcccttaagagctatgaagtgagtatattctttcagaaattgacagtacaattgttctgatacagaaagtgacaccatagagtatattaacggtgtaattcttcacaggcattttttataagtcagagtttaaagaaacagatctttcttcctctttccctatgaactaaagcatttttaaaaatgaagtcaacggaattttctctctcctttaatttaacttggaaagaatgaatcagtatttgctgtactggattgtcattggaagaaattaaatgttctctaaaaataaccgttggtaatcaaaatagtatttgcacttgattgctatttttttaacttttttaaacacttgaaaaaatctttggatgcttataaaaataattatttttagccgctataaataaaagggaatatgctgatttaaattactgttatcctttgaattctatgtacttggtaattttcagtgacaatatatcttccacaaagcccttcagaatatgggaaaaataggacttatactcagaaactgaatattatcaaatatttttgtaaataaaaataattataggtagaataaaatctatttaggctatgataaaatgttttaggagggaaattcatgaatagttggtcattattacaagttgaagctaaaagtattcatgatatggtgaatcactggtgaatgtgaaagtcatatttatgtttatttttgatttaggatatttcatttccttttttgaattatattgtctggttagttcattctgatacacgctttgtctttggatagttcatgccattttagacactatttcagcaacatgggatcagtgggtatatatttatattgtattgctgaatttctagaagctttaataaagaaatcagaatccagcttttctacctcaaagcaaatggttttctctctaggttctgggaaagagattttaaaattgttttccatgcaggaacagaaaaccaaatactgtatgttctcacttataagcagaagataaatgttaggtacttatgaccataaagatgacaaaagtggaccctggggacgactacagtggggaggaagggagaggggtaaggattagaaaactacctacctgttgggttctgtactcactacctgggtgatgagatcaaccaaaccccaaacctcagcattacacagtataaccacataacaaacctgtacgtgtacctcctgaatctaaaataaagggtgaaattctaagtaaataaaaataaaaatttttaaagaaaaaagcaaaaactaaaattgttttctaaaagaaaggaaggtcttggtgtaaaatttgtgatttaattggtctttctaaaattcagttttgttttgttttcaaatcagatcttgaaaattttaaaaccaaaatgaggagtacagtgtctgtgcgtgaaggccagggagttgtgctgctctgcggccccccaccacactctggaggtaagtcatgctctgtttctgcttttcatatttattaaggttcagggcaaggcctgcagcgcatgtactgttattgcatctgtaaattactctgagaaacttgataacctgagcattagattttgtctgctgagttggaatatgaggaacactacaaaaaatagtccatccagagaggtttctaaacaatcgactcattgactttttggtttataaagacaagagagatcacatttgcttcagtcacctaacggtgctaaacaatgctttgtcattacaccattatcatttggtttttagttttatgccatgtcaaactggatctttgctgtttgtctgcctctctttctctctctctctctctctctctgtcacacacacacacacacaagcttattagtatgtgccaataagcctctttatatatgtattttatatatatatatatatatttatacacatagaaatgatatgtgtgtatatccacatcatttacattggggcgttggaattgcaaattttatgctatattggtataaattgaaatattactagaaattcagaaccttaccaagatagtgacccagagtaaaaatgaacttcagcacatatgaaaataattttattatctccccagtatgagcctggggtgctggtttgattttcctatcgtgctctctattgcaaacttggccacttgcaggaacaaagagggcattattaatgaataaatcactgttctcagagaaacacgtattttgttattgagaggatgagaattattgggagataaacaagttagagtggatctttctgaccagaagtgaaactgagaagtctgcttctcattacagtaaaacttattcaaaggaaaacatgctggactttatttgttctgtgacatacaaattacagtcctttccacccaaagagttgtcagttttgatcacaaaccctcagcccaataaaacagatatctcccatcttcaggatctggccacttgaaattcgtgaaccatctggagactgcagacttggagcttgattaaaaaataggattgccatcatgtggtctgctgtgggtttaaattgtgttctccagtttatttcaagggtgttcataattgctggaatcttgatgtttcagaagaactttaagtttgaagggaagcatagagcctcttgattgcaaacaaagtaacagaagtcaaaccgtattgacaaaaaattgggagtttgctggctcacataactgggatgatcaagtggcttctggtagcactgtgaggttttacgaagagatacaccacccagaaggacgtgctgcctcgccacggggtgtggggttagtggatggcctccagctctcactccttcctggtctgccccagctgcagagagacacttgcccacagtcacacccctcctgaggaagcccacatctagtgactgagcaaggctcggatatgaagggtcaaccatttctgaccaacactgggcaattctgatttaatccataacttcctgtcaggatgaccatgtttttgttggaccacatcacaattcagtttctttctcttcccagttgaatcctagttttttcctttcatgagttttgatcattgattaaaagcttttattccaaactctatttaggggtccgctccctgaaaactcaatccgttggattcagggattgaatcaattccataaacaatccatttttctctgtatttcttgactgcacttctctccatattgcctccattctcatgtatcttccttgtggaggcaaaggtgacctctgacagctctaagttctgtgatccttaatgctaaatatcctaatgaagcagacaccctgtttctctatggctcctgattcttttagaatcagccttttttatgggagccctgaagctgagggcttgaatcagtccaccagctgacaagcactggaatgagaaagaagcagtttccaaaagaagtgttgtattatgagtaaaaagagggagatatattagatagaaataaataattgctaaaactacatctaggaaggaagtatcaaaataatttaaatttatattgtctcaaatgaacataacataatagctgggtagtcttggttgtgatcagttttataggtgttgacccaatttaaaattccgactgagtgattttgtttaagtattattatgattagatacattcattgatcggaaaggaggaactttttggttgcctaagtatgcacagagtgaacatgtcttagtaagctgttggaggaaacatgtcccaaaagatgaatctattcaaatgttataaaattggagaactgttagcccatcacacctgtcctaaataatgatatcctgatttttctctgcctttggtgacttcaggtagtcctttcatttttaaaacactcggttgggatgacagtgtaagtcaaataggattgtaggtgaagacgggaagaaatcttcccagatgtcagacatgaacccataagaacccagagcatgcataggagagcaaataacattcaccaaaagcatacttccctcagttccagattgtacagatttagatgctaaaaagtgtgatgctcgttgatccaagtgtctgtaatgcggaggtattcacaattcacgtccactgtcttaacacattggcttatgagcttcttgagggcaggcctatgttggtgttcgtctgcacccaagagcctagtacaaggctggtttgtaacaaacagtaaatattggttgaagaaatgaacacattcatgtaaggaatacatttttaaaaatttggccagttatacatgctttttgagagttcactggaaactttgtgaagatataagcttttaacagccaaaatgacctgggtgccaaccagacaggtgaggggattgacagatcagagtaaactctgtccacagcagctggtatcagccccgcttcatcacctttttgacttatggcctttaattcagtagagggtatgagccaggtcagagagcagctgaagctgtaactccggggtatatcagtacaactgatgaaggattaatcagagagctcatggcctgcactgtggtccatttggttttcttcccacagagtcgcacagtccctgcaggacatgtgcttgcccttctctgtctcccatactttgtgttagctatattcacttcacatttcttcatttcttcttggttccctctctgtggttagaaatgtttaaatttgttatttttctgattactgaagatacaatcatattttatttatctgttgtatttcctcttatatcagcctaacagagtaagcaaagaaaggcagtaatagtaataataatagtaaccagctgggcacaatggctcatgcctgtaatccagcactttgggaggccgaggcaggcagattgcttgagctcaggagttcaagaccagcctgggcaacacggtaaaaccccacctctacccaaaatacaaaaaattagctgagcatggcggtgcacacctgtagtcccagctactcgggaggctgaggtgggaggattgcttgagctcgggaggtggaggttgcagtgagctgatcataccactgcactccagcctgggcaacagagcgagactctgtctcaaaaaaaataaaataaataaaataaaaataatcatagtagtgttagcctctgtctattgagtgttgcttagatgccaagcagtgttctagtcctttgtggaaattacctgctagtgagattctttttgggtaaaagtatggggaggaagatgtgtgataatgtacattagagtctggaagctgagcctgcagatgctaagagcgtgggctcttaaccagccaatgcctagtgccttgagcccagacttcctgcttagaaatggcacatgaggcaggaggccagaaactaagcttcagcacaaaaccctccagcttttatttagggctacacttcgggagtttgcaaagtgtgcctcagagaggaggcagccaacctaaaatcacagagctgtgaagaagtaaaactagaacctggatgctctgactcatgaccagggctctttctagtatggcatgctctaaaccagcaccctgttgccattctccaaatgagaagtcacagagtcctcagcagaagtgacactgtcctaagccaaaagcttctgacatttcaaaattggagacagcacagttcatggttttgttttaattttccagcccattgtttaacacatcagcaatgcttaaaatcacattagcagaaatatctccagagttaactaaatgttttgactcatagtaaaattgtgttaaaatctccttttagtgcagtaagtttataactttcttttgtttatttgggataaaacccagaaatgttctccataactagattgggaagatagatgtggaaaaggcctaaataaggatcccaaagtgtggaaactgcatatgttaatcatatttccttaattaatcaatgtaatttacaagatagtatcagcaacttggggcagctctgcataagagcatttgccatctatttgatactataataataaaaaattgttttatggtgggagacaatgaagaattttcctaggaatccctgtaacctcgcagcaacagactgctgtcatctgagagggttcttatctccccatcattctgtgtcattttctgccacctcccagtcattgctttctctgcagagcaatccagcacctctatgaagcaagaggaattaacctcccaaagtttgtcagaaaactaggaaatcaaaagccagaaatagaagactggacatgcatcacctgtagcataattattaatctagttatcagtcatgtgaaaagctgggagttcgtgttaattaccattcacttgctgatatcaccacacaatcattagacattgaaatacacgagaaaaattaccctgttttcagtaaggtcataagactagttcatgggcaccttatgataaatactaattactcaggaattcataggttaatcaagttattacatacatgcatgttaataaagagatgagttctgttcaacaatggctgatagaaatttattctgagtagaaaacaggcttgagtctgtcccagtgtttaatcagcaagtgactttggtgtcttgattcagctttccatatctctgctatgcacatattcttgaaatggaagtcttgtatactgccattcacatattataacaacatagcccttgggatggaaaaacgagaatgtgagatgccaaacagcaggtaatggaggctgaagtgacattatggtaaaaattgccttgtaaaccctggtgtgacaaaggtgagaactgttagcaacatgcccagatggcatgggatttacaacttctgtatcagcatctttatttttttttctttacccaagatggatagactgaaaaacagaagtcagctcaggtagcttagctgacagaacctgaagaaaacgcactgaataggagttttcatctctaggaagacttgtccagttgctagagtctccgtcaaggcagggagacacatgactagtgtttttggatgtgattatgtctcaaaacaacaatttccttaaacagtttaatctgtaagtataatacagcttcatcttaggcacacagttttccttgaacaacactttgctactgttctgcaggtaataaagttaaactttaaaacaggccaggtgcggtggctcatgcctgtaatcctagcactttgggaggccgaggagggtggattgcctgaactcaggagttcaagaccagcctgggcaacatggcgaaactgccccgctactaaaatacaaaaaaaaaaaattatccaggcatggtggtgcgtgcacctatagtcctagctacttgggaggctgaggcaagagaattgcttcaaccctggaggcagaggtgttagtaagccgagatcgcaccattgcactccagcctgggcaacagagtgagattctgtctccaaaaaaaaagataaaaaaaatttaaaataaaataaactttaaaacattagcatttttcaaaatcttgaagtcaagaatgtatgtataggtagtgtcaaaataaaaaaatatagagatgaatctctaaatttgatgttttatttgggaagaaagaatatgctttctagctgggcacggtggctcatgcctgtaatcctaacattttgggaagccaaggtgggcgggttgcctgaggttgggagatggagaccagcctggccagcaaggtgaaaccccgtctcactaaaaatacaaaaattagctgggcatggtggcaggtgcctgtaatcccagctatttgggaatctgaggcaggagaattgcttgaacccgggaggcagaggttgcagtgagccaaggtcgcgccattgcactccagcctgggcaacagagtgagactctgactcaaaaaaaaaaaaaaaaaggaatatgttttctgcagtggacatggtggctcatgtttgtaatcccagcactttgggaagccaagatgggaggatcccttgaggccaggagtttgaaaccagactaggcaacatagcaatactttgtctctttagggggaaaaaacagaattaagaatatgctttctggctcccatcacatttgcatcagaggtcaatgtgtgtagactgcttctccaataacccagtagtttccaccttccctaaaggagcaggtgcaaaagttgcattacagcagcacttatgtcaccacaaactgcaagatcaagactaggaagcagatgattgataggctaatgagaaattggcatctgtacaatagaatattactgcttatttattgctcctatcctggggataggttagaatgtcatggcaaacagttaggtaatccatctgtagactgaatgaatctcaaaattgtaaactattttttgaatatgtcaatactgatgtgactattgacattttcaggagttcagaatattaacagattcatagtcgcattaagacaagtatgttctgaatcaattgacatataaaccttagctgcttttatatggataactataaaatattttgatctctaaaggaaacatttgttgtactctatagaccattttgtagttggaaatggagatgaaaatcctgaagttctccaaagtgcctgaatgtggaagctgtgaatttaaaatattaattgagcctgccttcaactttccttttttctttctaagtctgtccatccaggcatattccatccatccatccatccattgtattcattcattgatttactcaagtatccatcaaacagctatttatttgtggaagatgtgatatgtcttataataataaggttttactataataaatatgtgtcttcacttgaataagattgatattaaataagagaaaaactgagcgtattgctcttgaagttgatagaaatatatccaaattgatacttgtcgaatactgcccgaaaccactccccaagagaaaagtactgagttcagtttgcaggaaataggaagatagataggaattctgtcctcaggtacatatgggcccacagggaatgaaaatgatgagtttgctagtgactagttaaccctagaatgacaataataggtgccattattattggccagacacagcttattgctcctaacagaacttcaaggaagagagtatcactctcattctgcactgacaagccaaggctcagagcagttaggtgatttgtccaaagccatgtcatggtagatttgggcacctaggtctgttgctttctttccttttttttttttttattttagaatgtccctctgtcacccaggctggagtgcagtggcacaatcttggctcactgcaacctccacctcccgggttcaagcaattctcatgcctcaacctcccgagtagctgggactatagccacacgccaccatgcccggctaatttttgtgtttttaaaagagatggggttttgccatgttgaccagcctgttctcgatctcctgacctcaagtgatccaaccgcttcggcctcctaaagtgctgggattacaggtgtgagccactgcgcccagctggtcagttgctttctgatggaaaattttcctgtgctcacaaacattataggcttcaatttttttttacttatacattttccaccttctaaaacagtgtttttcagactcctttaatgggtactctgtaacaatgaaaacctttttaagcaccaccctgctacaatcacactcacacatatacacatatgaaggaagcagagagggtacaaactgggcacctagagctagactgcttgagttccaattctaacactttcattacaagctatggaatttggaacaggttgcctaacctctgtatctcttatttcttatctatacatggggaataatcacagaacctatccttataggatcattgtgagtatttaagaaggcaatccatgtgaattgtttgaaatgtctgatttatttatacacatacaaatatactaccatcttaatatgtttatggaaaaatgtaaaaatttaaaatatctaaataaaagtaaatctatgaaggggattaactatactttctttctgtaccctgggggattgtctggctgggaatatctgaaccccactttagaaaacatggttctagaaaatgtttgggttttgttcctcattggattatctgtggttgaggaggaaaaagttaaaacaattatgtttagagaaaaggaatggagatggctttgagatgcccatcctgtactagcatcagtgaccccaggggcccagccagcacattccaactgacttcaaccgattggcccagggagaacacctgccacaagatgagccaatcagatgctgtctcctgggagtttgatatttgacctgtaagcctacaagtctgaatttgagagtttggaacagagcctttctatcatgtagattaggcagccaagaaagctgatgcctcaggagctgagatgtagcccgacagaaacaagaagagaccaggggcagagattaaggacgaaagactgcctggcctgcaggctccccagctctcatttctgtagctgttttctagcccttgggttctatgaaacagcttgtgtctgtatatcattctgatccttacttaggctgactgtgataggtttttgtttctgacaaacaaactcataactaatgcaatggacatcattttaggatgatatgtgtgtatgtatgtagtaatgaaactgatgcaaggagaataggaaatttaatttaaaaataaagaaacagaagctttattttttgacagctgtccctggggctgtcacggcatcccttttggattaaagtcagcatggaacataccacaaagagctctggaaagagtcagggtcatggaaacaacttcgagaaactggattcattcattcattacaacttacactttcagtctacaggtgaatttcccccaagcttcagaaatgcccctgaccatttcttacattgttctcacagcagcatggcttcacacttccgccttccagtttattcccagatcccctaactggtctgcagtggtaggatgagaaaatcattctttctcactctaaagacgtacgagtcttcttgctctgattccatccaccaacagacagaggagcctgaagcccatcaaaaaattacatgtggaaactcaggggtttaaatctactgttcgagagatagtgcttcaacagaatttattttaatatggcagagtcctgaccgatgttttctgctttaagtaaaaaattagctataagtcaagaatggtaaaggctttgtctcctatcccaaaaagaaacagaaagaccattagttgatgcttttggtcaaaaaaaaaaaaaaaaaaaagactataggaaacaccaggtgagatccaagaattgatctgtgcactagcaagtgggggcaataaaacattggttgcttccattacagcgcatttgtgtgtacctgtgttttaattaatattacacatgctgctgttacaaagaaacctgacaatgtattagatcaaactgagggatatttcttacacagataaagtccaaatcaagtgtttttggtcatagggcagtgttttgtaaactctagtggctcatttagggggcttgtttaaaatgtagattccacagtcccactcccagagattctgaccccatagggtggggtctttcctggagacctgcattctttatcagtgacccaggagagtcttgattcagatggtttttaagccatactttgaaacacattgtcttcaagtcatacaaatgtaaatgctttcaaaaaccatttaaaggaatagagaaatatttatgccagagcaagtacaagagttgaagtatttttgtgggtgaattttattaggtaggacattttaaactctaaaacagaagtgaactttgtggcttacatggaactttgatactcatttatttataagctaggtaatttccatctcagcagatttttttccctgaactttagctgtcttggagagacaaaagtatgaggataattttaaaaaaacttttacaaaaatgctgtcttggagagcaaagttgctagtctgcctagttgtgtaactgaaatttcctgactttcatccatccacatgcccaggtgtggagtagctggtgggtgcttcgcagtcaactgcactgatgctcacagagattgagcacctctcttaccacttggttaaggttttatagcttttgatcctcacaggcactgcttggcacctcaccccagagtagtttggatttgtttttgttgttattgttgttattgtgtgtctgtgcctgtgactgttgctctgtctgaaggaaaacccagattggtcttgtggggagggaatttcagaattgatccccttccttttgagattcggcttttatttaaaacctgtttttcctcattaaattgagcaagttggactttgaaatggtaccagggttaaaggtaagagtggaatgaatcatgcatgaagttttcagtaagaattcattcacagaaactccacagtgatcacctttccctattcccacaggtctgcagcatgcagccaagtaattcaaacgaaaggagggctaggatttgaggcttgggcaattattttcctggtaacagctaaatctctaaacagcatcaattactttatttgcattttttaaaatatagaaaatgcagttcttttttgagtttattgaggatttggcacatgcatttcccatttgctggttacagttcttaccatggctttttttcctaaccgtggctaagttaaattcattagacacagacacattttgtatatgtatatgaaacacatggagatatttttcactattcgtatgaaatttgctctgcatccgtcagctttcaataggttatgttgcagcaacaaacaactccaaagtctcagaggcatctaagaataaagattgatttcctatccatgtaccctctaagcagtgggttggctgaatctgtattccatgtgattttgtcgttttgagaaagagtggtccctacctgggacgtgtcattttcatgacacagagaaaataaaactgtctgaactatgcaagctgttcacaggtggtatagacatcatttttgctcattccattttccaaagtaactgttaatggccagtgctgaccaaatgggccagaactttcctgccacagagaggagcagcaaataataataacgtaattcaccatatgctctcttattttttctttagttatttgacctttgtggtcttcctttcagtttttccatatttgacagagatctgcatatgatagccagtctacattattccaactctactataaagaaaacaatgtataatgaaaaatggtataaaattcagtatagaagggattgtggtaaactgaatgttccacctggagggttcatgggctactcagctccagtggattattgccatggagaaagtaaatttttaaagaaaagccagaaactgtatgctggtaaaattttccaatattttttaaatggtatggatgaaacactacatggtttgaaggtgccttcagcctacaggacacagctgaaagtctcctcctttaaggatattctttacagataataaaaaaatgaataagcctcattcacttagcaatctgagggattacaaatatgagagacagtcaaggggatggtttataaagtctttaaaaatccacttttcattagattcaggggtacataaaataattccaaacgaagctaattaaagcagctaattataggcccttggaggcctgtagtatctgaaagtagcatctcagtcctggaaatagttttccaaatttgttttacatactttttctgaagtaattaaacattctccccttccagtctagtttgcatcattacttttcttagcaaatgttttatgcccccaaagtgaggataaatcagtcagctaagcacaacagagtaggggaaatctaaagagtgagattctattacacataaatacaaactctgtaatatttcagatcgattttacctggaagaaggtgaatttgaaagatcagttgacagatgtcagctaaagctcagttccagtgaggacacatcatgttccccaaagtaaacaccataactaagcagaactatacctaattctattgtagctataagtaaattgcttgtttcttctaatgtaaattttatgtaaattcagaaatttaaggacttttccgttttttctaacatatgcaatgttttcagtgacattattatatctgaaagtattaggtgttttgcagcccactcctgttacttcttctaaattctgatttggtttttatacagcctgccacattctgtctttactactaccatttactgatcaccttccacagctaagtaacattgttagcactgccttcctggcaagactatctaattgatgggttgataacgtgaaatacagttggtaaagtctgtgttcccagcagagactccttattttctctcatggttttatacttctgtcagcatatgttatgcttagacatcatttgggtgacattgagcagcattttcagactgtattcttgcagaatggtaataggccccatggaaaagtatgaggacaattaaaaaagaaaactttttcaaaaatgctagggaaacaagaatgcatctttcttttatttctcagagcttttaatgggataatattgattttacctatcaaagaggaataatccagcatgcaacatttcctaaacttacttgagaagaaaactctttgtttatggagcatcttgcaggaccggatgttctgagcagcacacttcaggaagcgctgacctagcttaaagatagggttcaccagtaattttcaaaatatcctctgccgagtgctctaaaggtttgtgaaaatactcaagggggcagctttgtgtacaaacgctaattttcataactttctcttcaaatagagtgactttttttttacctattttaaatgttattcttccatatgaatatttttaaagataggacactgggctgaccaattataaagaaagaggataggacactgggatgacaaattataaagaaagagaaagaaacaacaaaagaaagaaagggatggatggaggaagcaaggtaggaagaaggaagggagggagggaggaaaggatagagaggggagtctctcctcttattttatcagtgagtaagtagagtcagttgcctgaatttattcagattcagcttgactgttcacttattgatacgttagtgggtcatttctttactatatcattatgaaatctggaggagaaaattaagggatgctttcactagttaatgtacttctggcatttgtaaattcagttaattatgtatggatcacattgcatctgttctagtaataacaggctggtgttttctggtggggaaactagtccatcaatcatctgtaatcattgatcttcagataaggggacccattctggcaggcttacggtaaccatagtgtgttttcaactctactgccaaaacatattgtatcccacaaatctcttaagaaggcctattctgtttccacttgagacatgaaatgacatctgaagtggtgatacatgtagacttaaagcaatctttttcaatcattataacctttaagcaccactaacatcccccaggattctttgaccttttctctctgtattatgctttttgacaactcagagagagaagcagtacacctgacatctggtataaacatgacatgttaattctcagcacacacttattattgccaaccatttacagatactcacatgatgtgttttgtttttcctgtggctctcacatgaaatctatatgggttttcttaatccagtgctagtaagcagtaaaagttatttttttattttcatagctgtggttctgagtctcagattcacaggttaggcagagggcaggggttggacagtcctgagccatacaatgggaggattctgttctctgcagtacaagagtagagagtaagaagaatttatgggctattagaacaagatatggatacataaagagaattgtaacatccacagggtgcagtcaaggcattctgaatctttctatgagtggagtgtaggagaagcaaaattccgtatttccaaaatgcattgattcacacttcatctcataaaaggtgttaaagaattcatgacttctttctgatccttggtgaagtatgttggaagtagtattccaagctgagaaacatcaagtatcttcaacaaaattgaaagaaatgctgttttgctaaaaccaagtcatcacaattagaaaatcataatgcaatgaaggcattttccgggaagtaaaatgagtgaaaaaatccaaattgaatggatattccaataactctaagttgcaagagcttcaaaataagctaaaaattgacttcttagtcaaagaaaatggcattaaacagataacctgtgagtctcagttgaagtgtcatgtagagaaaagttaaaacaaaaaatatgagacagttctgtccaaagaatagtttctaggtaaatttttgtgaacttccagttcttgtacacatgcttagggacagacttctaagataaattgtaatagtatggaacaaccaacagttggattaatagtactgttaaaaaaaaaaaactttagacaaaataaatgtaagagagtttatttgagcaaagaaatgattcatggatcaggcagcacaaaaaactggaagaggttcagagagctctgcaacaaaagtaaaagaattttatatgctgatcatgaaaacaaatagagaagttacctgattggtgacagctaggtgtttgcctaatttgggtacagtgtgatcaggcattcaccttacttatctggatatgattcagtgggagattcctatctgtgtaaccagttgtgtgcttggctgttcatgattggctaagtcttgctttgtttggttttagtcagttaaaaaaatgtttccaagataagttccagtttgtttacctaagagctctggtctcagagacagcctcaggtgaatggccttcttatttactttaacatgacccaagaccatggtaagacatcctgataaagggcataacatatagcccttatatatatgcaaggctcttcgtggaagactgcttcttctaagctgtgtgtagtgcattggccaaagaaatagagaacctttacacttgaaataaaaaataatataatagagtgaagaactgtatagacaattttactgtatgttagttccagaaggatactagttaagactttggggaaacaacctccagttgctctttatgaaacaatgatgtgacttcgttagaagacaaaggagagatgaatgatatgaaattcttctaagatcagagaatgcaagagcacctcctgtagggtaattactctgaagaaggcagaggagattcttacaaagctgcatagaagattccaaatgaaaagtctagaacataaataccctgtctaattacaaaggtttaatacaatctctgccgtaaattgggagatgagatgtgaatgcatatagttgagaatggccctcgagatctggccgcattaggaaatgcattgacaaggatccaaaaagcaagccagttttaggcctcaattatgtcccctctaaagacagggataacttccaaatctcagttaaaagaattaacacatgcactgcctcctgagtgagcatgccgtatctttgactttctttttctgtgatacctttgaaaaaccgaccactgttactgttcctgggagataatccaggataagacttactcaatgcaaatcttttattaaaggcctacaacattatgttctggagaattttgttttccttttttttaaacattagttagatcagattttcaaaagcatctcagaaatattcctagtcttaaatccagggatttatgtaacacaaacttgcaagaccagtgggaaattaatttcctttgaagcacattagcttgaagtttgcaccgtcccacagtggagcagaatttattccaatgttgttgatgacctctcaaggtcctaccttccctgagctataagctgactgcagaaagccaatgattgtctgggccattctggctaagctggaaaacatcaggtcaaagaaaggttaactggagactcaccatgctgctcacaaccaccaacaaccattggggaacctattgtgcatatggcctctgtgatatgtttcctatcatacaggagagagaacacagttcctttaaatgtcaacaagttctgatactttatcaaaatgagatacctttcaatggatgccctgaggagtgctaccatcaagtatgtatttgtcagtctttttctttttttatttatatatatttgtggggtacaagtgcaattttgctacattgatatattgcattgtggtgaagtcaggatgttcaatgcatctgtcactgtactcaccaagcaactgctcatcgtccactccccagtgttttccaaacttgctattttaagaagcaagtttcgaggtcttttgctagacctaggtcttccgctaaggatatttggcttggccgggcgcggtggctcacacttgtaatcccagcactttgagaggccgaggtgggcagatcacctgaggtcaggagtttgagaccagcctgaccaacatggagaaaccctgtctctactaaaaaaaaaaaaaaaaattagccaggcgtggtggcacatgcctgtaatcccagctacttcagaggctgaggcaggagaatcgcttgaacccaggaggtggaggttatggtgagctgagattgcgccattgaactccagcctgggcaacaagagtgagactccgtctcaaaaaaaaaaaaaaaaaaaaatagaatatttggcctggctatactttacccacatcttcatattctctccattgtaatgcttctagcacccacacaatatatgtgttcctaaagttccacatttctttatcttagcattacatagaaaaatagaacaaattccagtttaaattctaaaacttaacatccaacatcctattgtaagagagaatgaaagatcccttccattctgccacattattctatacatcctcggttttgagattatgcttcttagcaggaaaatttatacttttcttttattcctttttatacttttcaagattcagcataatagacaaggtagagttatcattttagtcctgaaaagaattagtaagtacatgtcctctgctgaagtctcctatatgtctttttattattggtttcttcctctagcagaaacaaaataattactagcaatgagaggtaatgtgctgttatttatattttagccatttccctttgtatgtgtgtgtgcatatatgtgcatacctacacatacatagtttcttttccttttggtgaaattgtagatttgctaaagaagtaaagtatctggatgaaggaaaattacacatagaaaaaaataagcaatttactggtgtacagttgccattgcatacagttaaactaaggaatctaaaaaaagtaagattttagaatgaaccgaagcctttctcttgaagataatttaaaaaaaaaaacacatagttcagtgtgatttttttcaaataagaaaagcaacgatgcttattatggaacatttagaaaatttagcatgtttaaataacaaaggtaaaatcatattaccacaatgtcaagataaccctcattttggtctatttattctcagtcttatttttttccttacacattttccccataattgaaaactgtaaagacaaatttgtacttttaaaattatcgttgtagtttaagcacttcacaatgttagtataaacaccttagaaacaatctttgttgtaaaaagaaataactttaaaataatatcttctgatcattgcttatcttttaaggcaattagcattttgtttgtcttgtatgatacatttttccctaatttgtcacctttcaacattatattttgcggattttattttgatttgctattttgccttggaatactcaaaagacactcatagcattataacggcaaaagactaaatattctaaatgaccaacaatagaaaaatgaagaatgagaggctactgcccctaaagtggatcaagattatctatcagaacaacagaaagcagtatccttactaataaaagagcaatgggatgatcttcctggataattcaaaaatggctcttgtcattgtatcttctgagaactcatgaacgtcacccacgaatctattgaaactaaaatagtgtcccacacatttacaaataaatatggaaaactggatagtcttcttggatactagccatagtcattataaaaacaatatgtaaatggctatataggcaatacatgtttaaaaaggtatgtgtcgtttatgcagaaagaaacagcagtttactggaaaacattacaattttaatgctggagatagaaaccatatttgtgaatatgaaatctcattattgtaaagataacaatttttcccaaagtgatatacaaataagaggtgattgtaatcaaaatcttaaaatttttggaataatgatattgataatgtatttagaagaatgaatttatttgaaagatgctattttgcaaattcagttgtttaatatgggaacttgccctatgaattactaaaacaatgtggaactaaaataaatatagcactgaaatattatagttattctgtaggaacaaggcagtaacacaaaatgatgaatcaaaaaattgatccatgtatgtgtgtatgtatatacgtatctgcaaatgtatctatatgatattgttttatgattaagggggcatttcaaagaagtgagagaaagagtagattatcgatgagtgtggaaataactgtctattcatttggcataaatgatgtcaaatccctttctttacatttaaatttaaaaatattattcaggtactaagataaaaatatagataaatacatttttagtgtaaggataagacacactttaccaactatgactccaaagacagaaaccgtatataaatctaagagacataatgatagaaaatgtttaatagagtagtttgcctaaatactgactttttcttcttttcttctttcttttcattttggtctatggagatttttttagagtaggggaaaagaagtgaaaaatgtgatggattcgactagagtggttttccttctagctatggaaattggattacctgtccctaccactggtgctcttgaaggacagttcacatgaaaaaatcacaataatccaaactagagactgaattttaaatagactatttttttttataactgctttagtattcagcagtatcatggtgggcatgaaacacacagtagaaaaatcttgtctggtttccttatttttcagatgaggaaactgagacctctgtgggtctcagtttgacttaagcaatgtcatatggtgtatggcagacccatactaaaacttagctttcctgataactctaattttttttccaatacagcatgctgtctcctgagttatattaagaacatgttgatgtctacaaggaaaaatcatttctgaacttttctgagaaggaaatagacttcattctctgttgggaggaaaagatggagttgtagtcaaagagagataagcatagaagtgatttggtatgttcaaagtgcccgaattagataaaccagagtaacagacattgagaagatttaacaactatcttcctttccttttatttatacaatgtgtatgacatccctgacacattgcaaaagtaattagttgctgaatttaaaaaaatgtttgtaagttcccctttcaaccaaattgaattaagaaagaaaattcctgatctcttggcacttgctccacagaataaagaactcctcataaagataaatttagcccagcagttgaggtaattgcttattttgtgtgtatttattttgatcctaccgtattcaaagtattgtattgggggagagggtgctatcaaaaagataaatcagaaatggtttatgatgtgtaggagaaagatttagacctagatttaaataggaaaagacagagaatagcgagtcttgtaagagcagaatagatgaaagtattacgagtttgggaagaaggaagacatcagggaggaggggggcgagtagaaaattgttttacaagataaggggtttcctgattcaaaaaaataaaaaaaaggaaagagaagagtagacagagcagggagtctcagtcaatccagagacaaaacagaaaaaaagaaccagagagagaattaaacttttctattttaatgaatttacacacaaataagaataaggagatcagaatatttctaaaggcccaataactttcttttggtttcatgatcactttgaataggctcctatttcttataatattttaataaaaggatgagctcttaaaaatttaaaactgaaaatttaaaatactgaacacaaattgctttgtggtaagtggatgttgtagaggaagtttaaacaccagatcaggttgataggattagatctcacattcctttctgattgctgtttctgctttcctatcacagaattagagagagcttctgaactgaagtttctgggtcgagtctgagttctggtttcattcctaactcaaccacctagtgctttgtgacttttctcaagggataaccatcaacctcctaactcccaaagttgctatgatgattaattcagaaaatgagtgtgaagcaccttcggaatgtaaatatcacatgagctctattcttctcttttactcctaccttatattctgtcagcaattcctcttaacaaaatattgcacagttttgttgaaactgtccatctcttttacttgaggagtcccctatttgatttcctgtttccaccctggtttccttatgcagtcatcctccataccatcgtcagagttagggctttaagatgtaaattcaatcacattactcccttgcttgcaacacttcagcagctgcttttcacaggtaaagtcaggtctaaattccttactgttcccacaaggcccaaaacatctggactcaacctacctcacaatgcctctcatttcactatcctaacccttcagaatacctagaattattgtcctcttgctcctcccagaactcagagcaccatgcccagtgttagggcccttgcattagctgttccctctgccgtgaaagtacactctcgaatctttgcatggctgactcctccttgccattgcaggctgaacaaagaggtccactttcctgaattgcatctaaagtaacctttcttcccagtcgctctttattgtatcacctgggtttattttcttcatagcagtaatcattttcttccattatattgtatttatttcgtgtattttaaaaagtgttacctcttgactaccttcaattggaatccacctccataaaaattagggctttgctaaagttttcagcccttattctcaaagccaaaaataatgcttagtatatagaaggcactctattaacagatgcaggtatctgctggaatgctaacaatgtcatttgccacctactttattcaaggtcatgtgttacaggaggtttctgttataaagatgaatcagatatagtttgtgatatagtagaagaagaaaaaggaatgcttctaaataaggtagaaattgatgagttccaaggaagatttacattttgtaagattagatgatatttaatttggtgggctactaggaagagaaaaaaatggcccatcgttaaatcccaaactaaacaccattcattcatggcatagtttcatatccatcccttaaacagtgctcctatatttttcactggaaagaggagagaaaaacacaaaccttgggggttttgggacgtagccgtaagacagcaaccaaaaagcttgtttcctttggggtttcatgccttactttgaagatttatgcagtttttgcattctaccctataatatatccacatggtaaaattgaagccctgggaacacatgtggagtgaaccccagggcctaacatttcacaggcctctgttcctggggagcatcccctctaatctaagaaacaaagaagaccttgtatcttttacagagcttattcttaaaagatgggctttactcttcagtgtttcccagccaaagcctattgctttaactataaagtgattacagatacaaaggttgggttattggagaaagatgagagtggttacaagaatggttattctggaaaaatgatgcactgagtagcagaggtgagagtgggggaaatgtgaggactggggagcagttatcaaaatattctcaacttcctgtcaccatagctccctttagctttctctggcgtgagtttaatagcccacattacattatgttgcttaataattatgctctaaaaggtagttatgttcctcagacccaatttactaagagaaagaagtgtctcatacattgtagcattattcttatgactgttatttttaaatgtttcattagtcccttaaatcagcttgtttcagacaactctgtgtgtgtgtgtgtgcgtgcgcgcgtgtgtggtgtgtgcactagagaaagagaggagagagtgaatatgagtggagaatgtgtaaattcaactagagctattaaagccctgtgacttggagctgaattgctttcaaacattttctataaataatgtttttcaattctcttttttatcttgagtgcatgcttttatgaaaactagttttgttacagtagggacagtttgaatctcttttttagtatgaacatttaaaaatcttggttaaaaaatctcatcttgtgagtgattgagtttcaagagtaaattaagttggctcttcctaagctgtggaactagaatgcattaaaccttttttggggacattttcattaataactgagtttatttcatagtagccaggcacatataacctgtcagttgagaagcatttctccattacaaggccacgagtttatccctcttgagtttttcttccctcctcttcttacacaagcattaatagctttaatagaagcagtaaaaattatgaatcttttcttattttgaaattgaagatatagggaatccttctttgctttgatcttataactagtattaaacactgacccacaaactcacgcaaacataaataccatattaaagtttcctttggtgtgcaaatcaatccttaaagtcttgtagttattgctggagtcttacaaatgtttcccaagagttgaaatgtttatataaatacctttgtaactcaaggtagttaccagcactgctttataaagctgaatgcccagagctttaattttatgctttgtacagatcacttggtatggcaaatatggtaatattaatccataaatagccctctaatttttaaaaaataaacaactagaaagggctttgtcatggtgccatagttgcagagaattgttgatcacaattacactcttaaacctaagatggcccaatgattttcataatggcctgcaagtgcacgttcgtataaaactttctgaaatacacctttctcaaatggaagttttccacactggagccctacaaaggattattattttgcaggctaaagaaaatgtgttaatgactagagattctaattgaaagagtaatggaagatgcaagacttctatcacgaccccaactgggacggtgccgttcctcgagaaagcaatttaacaacagctctgaactttggtgttcccatctgttaaatggagattattaagaacactgcctgtttgaagataaacaaatgagaaagttaaaagaaaaagtaatgggatctttgaaggagaagaaagagccttatgttaatttggagattttttttctttgtgtaaagtttactgacaaattttaattagacacatcattcagaaatttattttttaatgattttataacccagttataaaactctatccaaaacagcttaaccatttgatttgtgtacactaataatgactttttaaaagattccttcagtgtaactaggtcattgaattcaccaagcatttactttacacttactctgtgctggacacaaaggataaaaacatcagtaagacaccatggttgccttcatgttgctcatagtctaggaagcgcaagagacatataatagaaacacttttcagccatgtgagtaaaaagtagaatagagaataccagaggctgggaagggcaggaggaagggggttgttgtggagagatttgttgaaggatacaaaattacagctagacaaacttacactcccaccaacagtgtacttacttagttcagctattgtggaagatagagtggcaattcctcaaagacctaaagacaggaataccattcgacccagcaattccatcactgggtatatacccaaaggaatataaatcattctgttataaagacacatgcatgcataagttcatcagcactattcacaatagcaaagacagggaatcaactggaatgcccatcaatgatagactggataaagaaaatgtggtacatatacaccatggaatactatgcagccattaaaaacatgagatcatgtcatttacagggacatggatgcagctggaggccattatccttagcaaactagcacaggaacagataactagttaccacatgttctcatgcataagtggtagctaaatgagaacaaatgatcacatggatggggggaacaacacacactggggcctgtcagaaagtggagggtgggaggaaggggaggatcaggaaaaataactaatgggtactaggcttaatacctgggtgatgaaataatctgtacaacacacccacatgacacaagtttacctatgtcacaaacttgtacttggatccctgaacttaaaataaaagttaaaaataataaaagattaaaaaaaaacttacagttagataggagaataaattccagttctctatagcattgtaggatgactatagtcaataataatatgttatataatttcaaataactagaaggaggattttgaaagaaatgataaatgtttgagttggtagatatgctaactatcttgatccgatcactaaacattgtatgtattgcaatatcactgcatatcccataaatatgtacaattattatgtgtcaattaaacagtttttcttaattaaaaaattaaccacgtgataagtgatcaatcaaagcttatataaattgcaatagggataaacaggtgggaaccacaggttaaacaatctactcatttttcacccttacctaagtgtctttaaggcctggctaatagtatgacttctcatcattgaaactcactataccaaaagtaaattattttagaacactgtttgacacacattttaaaagttgatctaaatgaatttttaaaatttagacaaaaaacatggggaaaaagaagtacagacatatctcagatatattgtggtctgggacccatctacaccacctcaataaagcaaatatggcaacaaagcaagtcacataaatattttggcttcctaatgcatataaaagctgtgtttgcttattaaatgtacaattgcattatgactaaaaaacaatgtacataccttaatttaaaaatacttcattgctgaaaaatgccaacaatcatctgagctttcagcaagttgtaaactttttgctagtagagggtcttgcttcagtgttaatggctgctgactgatcagggtggtgatcacggaaggttggggtgattgtggcagtttcttaaaataagacgacagtgaagtgtgccacatcaattgactcttcctttcacaaaagatttatccatagcatgcaatactatttgataacattttgtccagaggaaaacttgtttcaaaactaaaatcagtcctctcaaaccctgtcactgctttatctactaagtttaattaatattctaaatccttttgtgtcatgtcagcagtgtccaacaggatattcactaggaattgatttcatctcaagaaaccactttctttgcttatctacaagaagcaactccttatccattgaagttttatcatgaaattgtagcaattcagtcacatctttggactctaattctaattttgttttacttgttatttccaccacatctcagttacttcctccattgaagtcttgaactcaaagtcatacatgaaagttagaatccactttttccagactcctgttaatgttgatgttttgacctcttctcatgaatcatgagtgtttctaatggcatctgggatgatgagtccttcccagaaggttttcaatttactttgcacagatcaatcagaggaatcaccatctacggcacctacaatcttgaaaaatgtgtttcttaaatattataacttcaaaatcaaatttattcttcctttcacttgaacacttagaggccattgtaggattattaattggcctattttcaatattatttgcctcagggaatagggaggcccaatgagacagagagagagagagagagagagagagaacaccagttggcaaagtaatcagaacacatagaacatttattgatcaagtttgccgtcttatatgagcacagtttgtggagccccaaaacaattacagtagtaacacgggctgcagaatagatgtatttgcaggcatgtaaacagcatttatctctttgtatgtcatcagagcttgtgggtgcatcattagtgaacagtaatatttgtaaaggaatattttctctgagcagtaggtctcaacaatggacttaaaatatttggtaaaccattgctgtaaacaaatactctcacccatgttttgttcttccatttatagaccacagacagagtagatttagtggaattcttagtaaccctaggatttttggaatggtcaatgagcattggcttcaacttaaagtcatcagctacattagttcctaacaagagagtcagcctcttctttgaagctttgaagcctggcttgatttctcatctctggctataaaagtcctagatcacatcttcttccaagagaaggctatttcatctacattgaaagtctgctgtctgctgtttagtgtagccatcttcatcaatgatcttcgctggctgtcctggaaaatgtgctgcagcttctacatcagcacttgctgtttcaccttgcacttgtatgttatggagatgacttctttccttaaacctcataaacctctgctagcttccaacttctcttctacagctccctcacttttctcagccttttttttttttttttttttctgaggcggaatctcgctctgtcgccaggctggagtgcagtggtgtgatctcagctcactgcaagctccgcctcccgggttctcgccattctcctgcctcagcctccccagtagctgggactacaggtgcccaccatgacgcccagttaattttttgtatttttagtagagatggtgtttcaccgtgttagccagggtggtctcgatctcctgacctgatgatccacccgcctcggcctcccaaagtactgggttttcccagcttttataaagttgaagaaagttagggccttgttctggattaggctttggcttaagggaatgttgtcactggtttgatcttcactcaaattttctctaaatcagcaaaaggctgtattgctttcttatcattcatgtgcttactggagtagcacctttaattttcttcaagaacttttcttctgcattcactacttagttaagcatttggtgcatgaggcctagctttcagcctttcctggcttttgacataacctctcttccctactacacttaatcattgctggcttttgatttaaagtactcttcttttcacttgaacacttagaggccattgtaggataattaattggcctaatttcaatactgttatgtctcggcaaatagggaggcccaacaagagagagaggagaaaagagagagagacaggggaaacaccagttagtagagtaatcagaacacatagaacatttattaatcaagtttgccatcttacatgagcagggttcatggagctccccaaaaattacaatagtaacatcaaagatcactgataacagattatcatgacagatgtaataataatgaaaacgttttaaatatgcaagaagtatcaaagtgtgacacagagacatgtagtgagcacacgctgtagggaaaatggtgccaatggacttagtctacacagggctgccacacaccttcaatttaaaaaaacacacacacacaatatctgcaaagcacaataagcaaagcacaataaaacaaagtaagcctgtaatgtcctgaaaacctctctgctaaatactttttattttcacattttactcctggcaataaccctgtgaaataaggagtattatcccacttttcagagataagaaaactcaggctcagggcaataaaataactttttcagagttgactaatagccagcatggcctgggttgtatttttctaaattaggcacttatataacctttactaaatactagccactatcgtaaattctttataaataggtacccattggaagccagactcctgtctgtcttgctgttttgctctaatctcagcatatttccagtcgtgtgtgtgtgtgtgtgtatgtgtgtgtgtataaagatataacaggcagtgtggatgttttaacattttttcagattacctgaatcaagtcagtcttggttatgttcttcaaagcatgtatgatgcccttagctgttgattgggtagagtggtttgattacatgaattctgttcccaagctcttgtatcatcctgtactctgggaacacagagaggaagatgatgttcctgtcctgtgatgctgagggtctagtaggagaaacagcaaaagacattgtagggaagcaataaatactctagtcatgtgcatgcaaatatctaatctagacttctcaagccactttgtttattacaatttaaaaaaaatcattagattaatttatattatttgcattttatcttattaatttgttcatatatatttcatttgcattgcacaggaaacattttccatatattaatgtacaataaaagagtcatatttacagaatcttttttctatgaattcagagcacttccacgcacatcattttacttatcttcacagcataataacaaagaataattaaaatcctatcttctaagattaaaagtcattaataatgagttgaaagaaagcagtggttttcttgtttgtaaaggttgtttcaacttttgttgcaaaggcttataagcctttctctaactttgttagtttcacaccatcttttttaatcaaatgactttacagagagattaactttcatttcaacatttgaaaaattctatgtatctctagataaacaaatacacttctcttagtgtttacttttctttgcttctttcttttcatggaaaatttagataacaatgatcatcttcatagtgagtttttactgtcaaccagagagacaaattgagattggatgtcatctcccaataaaatgtacacccttgatgtcactggaatgatagatcttttgccattttgctctataatggatttaaaaattaagtcagctatttctgttctctaatagcgttataatacactgcttcaaaatcacatcattttgctatgactgtatggttaattaacatctagagagggtatgtcctttattgagactcactatatattatttccactaatcagatgcagttttttccttcagttttatagttattaacttactaccctttgagttttcaccttaataaacaagaagaacagttttgtccataaatttaagtctcaaaatccctaaccttgtgtaaactcatttctagattaatttgagttgagcatctccacagacttctctaattagataagtttattattcttcttctttttggcttttcccatgaggaacaagcaattttctgagtgtttcttattctgctgcacaatatctcctctacctaatatctcatcttttacctttttgttattgagatttttatagaatgtacttttatgatgctctaagtgctttgaatcacaagtgttgatctatctttattgctattaaactttcagagatatatcagctacaattgtgcttgtcattctgtgttcattgatgggtagtgaaaggtcaggttcaacattaaaagattctgcaaatggaacagggaaacttggcacactgtggtggatttggaatcacagatctctttctggccctcgcttcctctctgacctcagtcctacttttcccatttccctctgtgtttcagccatactgactgtcttgtgtgttccttctacctggcagcctcagtcctgcctgagggcatttgtccgagatatttgcacagcctggaactcccttatcttttcaaggtcggctcctccctgataattacattttggtttaagtgttagctccctaataacactccctctgcaaatcatcaagaaagggaaggtcacatgcttcaaaaaatataccagggaaggaaaagtgaatttaagaggaggaaattaaaaagttttagaattgtgtgaacagattttcaaaattatgagatagcagcacatacacatttaaacaccaacaatcagatctgcactgtggtttgggagttcatagtgacatgcattctggcttgcagtcatacattggttagtcaaatgcgtgttctcagacacagacctcctgctcctagtcatgtattaagaaaaaaaatatctcacatagctcaggatggattcatgtttgaagatgtttctttcagtcgaatttggactgttgaagtaatggaagcaagcttggagtccattactgggatagaagataagttaaatatggcagatgcacttcatggagtgttgtacccaagttagaaaccacaataaaaggtacaatgtggatagatcttaaaatagcaccttttgaaaagaattaagataggtaattagatatataacacagtaccatttatgaaaaaaaatacccaaaccaaattgctgggaatgttctagaccttgatctgggtgatacttgcacaggtgaatacatatgtaaaaactcaccaagctgtccacttaacatggtgcactctactgtatgaatgttaaacctaaattcaaaaataaaaaaaaaataagctctgtccctgactaccctgctcaaagtacttctcccaagtccatttctattgcatcaatcttttaatactctttttgtagcaccaatcatcacttggtatctttctaatatatgtttgtgtgtgttcattaatggactacctcccactactagaatgtaagctccctaggacagggaactcctctaacgtgtatgctactatatgctcattagcaccaagttctctctgtcttgttctgctgtacaatattctctcgacctaatatctcatcttttggcttttagatattgacatttttataaatattcttttatgatgttctaaagccttagcgattgctgaatagatgtttatttgttgaatgaaaggaaggaagaaagaaaaagaagaagcagggtggaagggagggagggagggaaaaggaaagacaaaagtaaagaagaatggcaaaaagaaagaaagaaaacaggaaagggagggaggatatgtaagcagaccaaatatagccattgtcttgtcagctctaatttacttcatcagtaactcccttgcctcagcaggccctttctctgttggagtaacactctttaattaatgtccttgaattaaatacttcacattcttggaacctagtttatatgttctctcactgttgtttttttctcctctgtctccttccttcacttcccccttcttcttagttcctcttcttccctttttgcatcacttctcatatttttcccccatctcagggcctatctctagttatctaagcaaagtcacatcacaattctcatagaaattagaagacaatgtcttacttaagactctaagtgtgggagtctgggtgctgtggctcacacctgtaatcccagcactttgggagaccgaggtgggctgatcacttgaggttaggagttcaagaccagcctgaccaacatggtgaaaccccaactctactaaaatacaaaaaattagccgggcgtggtggcacgcgaacgtagtcccagctactccagaggctaaggcaggagaatcgcttgagccccggaggtggaggttatagtgagccaagatggtggcacacgaatgtagtcccagctactccggaggctgagacaggagaatcacttgaaccccgggggtggaggttatagtgagccaagaacatgcagctgcactccagcctgggggacagagcaagactcctctgtctcaaaaaaaaaaaaaaaaaaaaaaaagaaactatgggagtacaaaatactaataagtaacatttattgagcatttaatttcatatgggccacagagatgtactttacatatattaagttattttatcttctccacagccccattattttccccatgttacagttgggaacataagctcagaatgtgtagcttgctcaaggtcatgtaattggtaagcagtagagctggatcagagcccatacacctgagcactacttcctatactgtcccccagcatagtaaacaaacatttactagtaaccaaatctacacattgttagcagtgctatgtctttatggtagtataatattccatatcttctttaatctgaaaaactcccattttaaggaggaagcatgcagtaagagaaagcatagatgatcctgggggagcctgtttgcatcaaacaaggctgctaccttccatgtaaatctcgagatggtcatcatgttttatggggctgccaaatccaaagttattaaaaccctttcattcatattacaagctattatgtgtttaattcctccggtaagacacatctctggtaattcatgactaaaaatgagttcatattatcatatgataaatagagtagcggcagaaaaacgaataaatgtaaaaggaaatactttcacagtacacagtgcctttttaatgtctttaatatctttttgcctgtattaacctctgtatcataattctgattgcccagtgacactcgcccatttatctgaacactgctaaatcttttattatcccattaccacgtttataatggtgtaatttgtgttggggaagcatctgctaagtgttaagtaggcatttgaagaacatatgggtgggtggatactgtcaactaggaaaggtttagggctgacccgatttgcctgacaggctatggctgccttgccaatattgatggtaacagtgtacaattccaagtaaggactgcttaccttctgtgacttctgctttcccttcccatgcctacctctcagagtgtattgtagtttccaaatgggttaactctgtttcttgattttttttttcccccaaagcagctcaaagctttctggggcctgatggaaggaagaacactgacatagagaactgtggaagcagagccaattattctgtcatcaaatagccttttctaaaaaaaaaaaaaaaaaaagcatactctcagcagactggtaaagtaaaaacagcatgctgttagggctgtttaacatttttcttctatttagtcaaacccttgaacaaaagcccacattccacattccgggcctcagtcccacccaggtgaaatactgcaggatttgggaatctaggtctattagagccctaagtcaactgttggagtaatgcttcttaatgagatcagttggctaagagatgacatttttgttcttgttagttcatagagtatcttttgaaggtcattgcatataattcctcgtaccatttcactagaaggagaggtgatggaggcatctgaatgggcggtcagtttaaaagaacagatctgaagaaaggcaaaggtttagtgttgtctcctacaaattatcaccatgcttcttcccaagaatcctaattatgtctttcaggagccccttatttatttcagagagagtaagaaggcttccttccaagtcattaggtttgggatctaaattgtagtttcatttctctcttttttctttggcatatggaatagagcttggatttaggaaggagaaggggacaataatggccagtctgagttagtttgtgcagaactgcttagatttgaggagcagggacttaggaattacgctgggttcagaccctgcttcccccacttattatgcctgagatctgtcacctttatgggcctcaatgctctcatcagtaaaatggggataatacctactacctgatgggatggtgtgaagattaaaagagatgtcggtgtgcagtaagataacacatgacacggtcaattctcatgaagtattagctattactgtcactactgtaactattagtatagttattattacaactataaaatacttttctcagtatatgtaagagttttcaaagcataggatgtaatacacaaaaataatgctacaggccttttgggacttatttttatttatcatgtttgtttctgtaaaatggcttttaaatagaggtttatgagagtcagacataatcttcccgtgaaaaaaggagaatacctgttttcccttatgtaactagaaagctcttacctattgagcaatgtgttaaaatgacttccagaattaatccaatttattaattcagttaccacataaaggtgatttgatttaattgtctttaaatactaatataaaagccagtataattccataaagtttgcctataaatatctactcatatacagtatttgagagataaagatcagtagtttttaataattaaaattctatttttaaacacctcaatttctcctctcagtaacttgcacacaaagttggttgaagctgcatgttgacggtatgaatccaaactgaaaaattaatcagtcgtgtaagacgaatggccagagtacgtgtatcgatctctaatacagaaaactgcagggattaactttaataatcaaatgaaaatgtggtaactaacataagaaatgaaaaaaggaagtggtggactagctgttttttaagtaaatataagtaattgatgaatccttataaaatatgatttctctgattttatccaggacttcctgtggtatcaaatacaagggctttctttgttgaagttgtaaaggccagtccgttttatcttgcctgtatgcttgtaggcaattttgtgggatgccctgtgaagaaaaaagggtagggtatattgtgtattcaaagactatttttgctgtttcttaggatataatttatcaggaaatgcatattagactaaatataattactgggatttattttatagatttttgggggtagagaagttttttataaaaataaatctattactggattttaagagctattttctatgtttgtgtttttcctttttttaacagctatggaaacctctgtgtactcacttgttataatttttcttaaactgaatttttgagtcacacttaaaatacttgaaattctaaaatcagtgattcgaaagccactcagtttgagtgtatctgattatcagaattacataattaatattctggggatactttatatactcaataaacttctaatatattagattctcaataaatatttacagtgtagactttttatttaaattcatgtacatttttatatttatcattgttaactggtttttgctgtatgttaggtgctcactttttgagaaacactaggatgattttaattcagtgaaattacatgtatcagacactctcctggcagtgtgatggactaatgactggctattccaagagccagtgctagaccatctgcctcagccatcagccgggagggctactatgggtccaccatccacctttaaacatttcccctttaacctaggatgcaaatttatcaactacaggagagaaaagaacatttttaattaccaggtcccattttatagatgagttagaatgttaaatataaattaagtttcttttcctaccttgttgtatgtcgtcattaagcttcaaaagttaagtagaatggagacctttctttcattttcaattaatatctggataccacccaaaacaatggcatggggatgagcatttaatgaacagctgttctgattttaaagtcaaagcaagttctctctagccccatagggaggtgatgagatatttccacgacttaagattagagacagtctagtgacacttaggaataattattcccatttggaaatagcaagttagaaatagaactccaaatcactgctagcttttgacacttttcaggcccatagaccaactcccagctcattctgcaccacctgtactgtgaacccctgccttcatggcaaacttagctctgtccgattaatttagcagaaaacatgctgtgttttggcatttctgcattttgagtatttctcagaatcaaagctcagtcctattaactttctattcaagggagaccagatgagtttttttggaacattttcattggcttatattctgttgaaagtaacattttaatcctcttttatttcctgcatagttcttttattttgctctgtctataaatatatacaatttagtcagttgttttgatgaaggtttattcttgccatgttccccatctgtttttaatatataatagtatttatgcatccaggagtgtttatctctgtgtctccaaaaattgcagcaaaatactattaaaaagcagcttccaccattcaatctgattggccataggagtcacatctccacacatcatcactttggagtttcttactgtcaacaaagcacagtaaacttgtttgacacctgcttgcatcgctttccactgccagtatcttaagctcctccagttgtttttgtctgccgcctcagacaccattttctcacttcttgaatcagaaagggctggttcactgcagtatatgtggtatccagccctggctctctgcttctcccacagaacctacattttgatcctcctttgcaggataccctctgaggacaatcaagcaagaccaaaatgacaacaaaaataagaacactaaccacaaacatttattgaacactcatcatttgttatgcattcctgtatggacttggtatgcattatcttatttaatccacatggcacacctataaggttatcattttaattttacaaacaaggaaactgaagaatagagaggaaaggaatctttccctggcttacagagctcgcagataccagaaccagggttggaacttagtcatgtgttttaattgttgcttttaatttgctttgtttgttttctgtgtatgtgttttctgttttgttttgtttttgtgacagggtctcactttgtcatccatgctggagtgcagtggtgcaattatggttcactgcagccttgccctcccagctaatttttgtagagacaaatttttcaccatgttgcccaggctggtctcgaactctgggatcaagccatccaccttcttcaacttcccagtgtgctgggattacaggcgtgagccaccgcccagccatatactcatgtttgtaatcactaccctagacattcttttatacaaaatgaaagctgtagaggggatttaagattttaaggattagaagagatcttaaacacctgcattccccaacccttttgaattcttggatacattttaactgtcaaaatgttactgttgctaacatgattgagcacctacatagagaggacagctttgtgtagtggttcaggctctgactcacactccctggattcagatccttccaactatattatgtggggcttcctccattatcttagttaccttatctgtaaaacaggatgataatagtactttcctcctatacttttttgaggaaaaaataagttaatatgtgcaagttgccaagatcagttatttggctcacagtgagaagtcaacttagctgcttttattggttttcatatttttgaaagagaaactacgtgatacccaaaagttatgatgaattcaggaacactatttggctgaagtatatttttgttaatcacagtattgctcacacattttaaaaagcaggacctgcatacatattttataatatagaattagttcagtctctccatcaaccacagcatgcatatggattacctaatccttgtggaaattccacagaccccaaagaattcacatcccacaggttggcaaccagagctgtctcgtgcaaccctctcatttttcaggtaagagaaaaagctgagaccagagagtttaaatgaatttatcaaagggcacacacctagaggacaaagacaagtgtaaacctcaaatcctatgactccaatgcagaggtctgtcctctttccaaaattacgcaaaaagctcatttcaggttactttaacgatcagagatagcaatagtcaaaacacttttgtgtccttaaacagtattttgtactctgaatttctgttctctacattagctttgttgtttctccttgttaagtgacagagaaacttcccttcatatattcatatataagaggacaaaaggaaatttggagagatgttctatgttctgtctactagccaccattaaaggtcatccagcaccctaggggatgatggccaaatccttgttcctaagactgttctcattgccttttttcacatttcctctggggaccaaatggtgcaaaagaaaattcgctaatttgaatttgaaaaatccttctctaacaagaagtgataaaatttattatttttatcagagcccaagtaagataagtgtctacgagtgacagaaataaaatatagctatgaggttgcttgatctaaaacatggcactctaaatagcctgtgatttcacacattcaaatcagaacctagaaaggcccttcagtacatgccagcggaagatcaactaattgaattaatgaaataaagggatgaaagaaataaacatacttataaatatcccagaagatatgttgttgagataaaatttggtacaaaacaaatatgagcagttcagtaattcccagagccctatacagcatatggtctcagaaaagacagaaaaagtgtctagaaacagaggactcaagtcccacagagtaaccaaaatagatgtgtttcttttacttgtaacagaatatgaactgccaaagtgtaaatgacagaaaagatctttatattacctcagttaatattaagaaaaagaattgtcaaaaaccaaggtaaatcatcaggacaacttgtttaataggaatttatttggaaaatagggagaataaatggaaaatgtaatattgaatcactagttgaagaaataaagttcaatatttctccatttgaaagagaatcaatgagcatttgtatcaaacagattagaattcctaggtaagtttattctggactttgatcaaggcagaatctaatgctcttttactgcagttctacatatttgcttcttggaaagaaaagcgttttatcatgttggcggaagaatactcacatgattgctgctttttcttttcacaaggagatctgtttcctttattagaattgctttatacaagaatgcgtggaagagggagcaggtggttgccctgcatttccttgtattgtttgtttccggtaaatatagttggaactaaaaaatgtcaggggacagtgctcttataacttctattatagttgtttcttttttgaaaaatataaacagaaagaaaattatttaagtagtaaatgtaaactttactacagcctagggataactgtaaatagaaccatcatatttagattatattaaatattcagtttggcttgaaaggccaatgccctttctaccaattgaggactatggcatgagctttgaaagctttctgcctcaggcaaaaatgagctgagccactgctttgaagtcgaattaggacacatttgcttttatttctgtaactctatctgcctcagtgaactgttctgtaatttcgaaaatcacaatgaagccaatattcaatcaattcagtatttttatattagagcaagaatcagattagaataactgtctccttaaaaatgaaaagggccaggtgtggtggctcatacctataatcccagcactttgggaggctgaagtgagtggatcgcttgtgctaaggagtttgagaccagcctgggcaatacaatgagacgctgtctctacagaaaattagaaaattagccaggcgtcatggcatgcactgtggtcccagctactcaggtggctgcagtgggaggatcacctgagccctggaggccaagactgcagtgagccatgatcttgccatcacactcctgcctgggcaacagagtgagaccctgtctcaaaaaacaaaagaaaagaaaaaaatctgagatctgcatagccctgaaatatagtattatagaattccttggttaaaattttgcctttgacatgtggtacatcaggatgcctctcattcattcttacatctttacctttattgacccattcaacacgcatctattacttaaaatggtgtgctggtaactagataggtggagtgttgaaaaatataatagggagaaagaaaacccatttaaataacaagaatatggctactactagaaattatttttagaatgaagtgtctttatatcatttaaatgacataaacagcatcatttccaggaggctcataagaacagggtatgagtagaataaaggcaagtttcatgtttttgctaattttcacttcccactgtctaactgttccttattcccaagtagtggaaattgtgaaagagactctgaattagactctgaatcagctatttcttcaggggtaaatctttaattgatcagaaattatttattgcattgatgtatactgtaaagaaggggcaattgataggaaagtatcaaatataaaataatgacaatggaggatttgataaaaaggccaattggtcaacgtaaaaactactttcaatcaaagatcagaaagagaccatttctgaagagatatctgcactcccattttcattgcagcactgttcacaacagccaagatgtggactcagcctaagtgtccatcaattggtgaatggataaagaaaatgttgtatatatacatggtggaatattcttaagcctttacaaaggaggaaattctgtcatttgtgacagtgtggatgaacctggaagacattacgctaagtgaaataaagccaggcacagaaagacaaatatcacatgacctcacttacacttggcatctagaaaagtcaagcttttagaaacagagagtagaatggtggttaccataggctggtggtgggggagttggggaggagggaattgaaaggtgtaggtcaaagggtccaaaatttcggttagataggagggacgtgtttttgagatctatggaactgtatggtgaccgtagttagtgacaatgtattatgtaattcaaaattgctaagagtatatttcactacaaaataaggataagtatgtgagctagttgatatgttaattaacttgatttaagcattttgcattgtatacatataccaaaacatcacacagtaccccataaaaatatataattataatttttcaattatagataaacattgctattattagtttttttttaggcggaattttgctcttcttgtccaggctggagttcaaaggtgcgatctcagctcacctcaacctccaccttctgggttcaagtgattctcctgcctcagactctcaagtagctgggattacaggcgtgtgccaccatgcctggctaattttgtatttttagtagaaacgtggtttctccatgttggttggcctgatctcaaactcccgaccacaggtgatccacccgcctcggcctcccaaagtgctggtattacaggagtgagccaccactcccagccaataaatattattttaaagttttttaagactcaaacattaaacaaatgagaattttcactgaaatctgaatttgagcagtaaccttgtatttcttcatgcatatttctctgtaacatcaggagggcttttttttagctaaattattaaaattgcataaaggctgttgcaattattttttcaggctttgaaagacttttctacagagtcatagagtgatagatatttttcctggacatatctccatagccaagatagacaaggattggaaagatagtgtaggggggtaggaataaatgtatgtataaacatatatatttattactgaggtagtacaaacactatttttattactcttttctatcacttttctcaaagcctataaaactactatctgtatttgacttgaacctgaagcagctatgaagtctccagcatatcctttaatgcctaaagaaattagcatttatagagacctactggtttgaagggcagactgggattacttttgattattgatttctaggggcatttttttgtcatgtttattttgcatatccagacataattgcatatcctttcataatcatgtacttatatagccactatttcttaaatgtcaggttgctctgatatattttaattgtgcaatttataatgaagccatcacttattattttaaccgattcagaaaagttatcattcagaaaaaataaaagattccttttaagataagggttttttttaatggtgtttaactctgatgaatagtttgatgtgctactaatggacaaaagtactgtgcgtgcgtgtgtgtttatgtgtgcgtgtgtgtgtgtgtgagagagagagagagagagagagaaaaaaaaaaacaatttctccagctttctaaggagtcgttcattgtccctggtaagaagacccttgtaatttggcagggcaacttcatcttctgctaatgacctcatttctgtttaccagtgaaaatggacattttattaagcttttaaaaatcacccgtaatgcaagatgagaacaatgaagcccccatgacattccttaaaggaaagagtttaaattttgataaaagaaaatgagatgtaatgtggaatggacagtgttattgtgacgcagcacctttattcactagcccttaattatttcagatattttattgcacattttccctgtctgtatggttcttttgtatcacttgcaaactgatgaagcccctctctggagttaggttctgagagttggtgtgggaatgataaaccagaagcactacgtttggattcattaaaggatgggctttccatagttaggttgtactaaagaaaatttccattttgcaagggcagtgtaaattttgcatgccattttaatagcaaggcaggtcaatcaaatcataattgtctacaattagcactcccatgagatgtaagcttctttatcttctccaggactgaactgaaaaagaaattgttatttactgtcactgaagtcatagaaaatgcttgctattcaatataagcgatgaggaaagtgccagtctggcaaaagggtttggcgtaaatttaagatctgcacaccaaaatgcacattgtatcaagcgtggctatgtgcaaaatgtgctattacaaagcactttctttcagcacacaaagcaggtcttggcagtgaaatgtccagtgttgacagcattttggtttggagctaatcttaagattgctttctagcattttcaaggactctgaactcttttgaaaaggtacattttgatactgaaaatgaggaagtagagaagaaatgcattgtatttcccagttcgttctatctgaagtgccagtgctgtcgttttgggaatcttttcttgagtctcatcactgtaccagaaagtccaggtacaagctggaggttgcaggaactgcaagcttgaggctgtggcatgagggaattgtctaagtttcataaaatattacaataactctatccagctctcactatgtcgcattctctgctgtgaaaatttaaactcctttctttagcaatgccatgcctctttagcagccttgccaaaggaaggaggtcaataaatgtcttgccaatgctgttgctagtcctcttcagtccccccaagccattgctgggcatcctgttttgagtgtctttgaatttggtcccatcattacacttcttcatcttgagatgtctttggagcaaggagtgaagggtagtcagtcccaccgaaagaacttcaactggagataggagaggagatgttctctttaaaataattcctcatgagaaaaagaaaggatacagaatgcaagcaaaaatacaaactagcttccagagttgctcttcacattttttgcatttacagatatgaaggtaagcacttcagttgggtacgtgaaggacattgctatatcaatagcagcagccgtggcaccaggaaagagacatttgttaggaaagacgcttccctggaagaagcattaaaaatgaagacaatgaggcaggtggatcacctgaggtcaggagttcaagaccagcctgaccaacatggcgaaaccccgtctctactaaaaatacaaaaattagccagacatggtggcggacacctgtaatgccagctacttgggaggctgaggcaggagaatcacttgaacccacgaggcagaggctgtagtgagctgagatcatgccactgcactccagcctgggcaacagaccaagactctgtctcaaagaaaaacaaaagtgaagataaggggtgacaatatattgtagagtcacaatgtggtgaaagatgctagtacccactggtgtcagttcctgaaagaaaatggtagaactgaatatagtggaatagtatctcaggaaactgttgtctcttggataagtgttatctctgttacctagtagaaatagctcatatatgctcaactaaaagcagagactaaaacaagagagagaaaaaggaaatagtgagtaccaaagtcttaggggcctagcatgagctttgtgaagcttcgtgtaggagttaggacaccatggtagccctacaaaagcaagaagggaaaaaataaaataagacagttaagggaatgttaagctcataacttgatctctagatatcactggcctaggacaaggttcaacaaaccttttcttaaaagaccagataaacattttaagctttacgaaccatgcagtctcttttacatctgcttaactctttattagcataaaagcagccacagacaatagtaattgaatgagtgtgattgtgttccaatatatttagttaacaaagcaggcaagtcttagttcactaacctgtggcctagaaccagccctaaaatatgaggtgagaaaggaaatagcatttttaatgtttttcctccttggtcattgttctccttatcttaggaccctcgcaagtcagacttggtagtatcctaaatcagaatggattagtagacatttatagtcaaaacaaagaaacatacaatatataatagtgtcatccacaaagcaacaacttacaatacagcttttaaaagataatgcaacgaaatgttaaacatgctgatagatgtctttcggtttacagtgcggactcttcaatcctaaccattgactatgtgttatttgaaccttaaattatccttagttttctacattgttttagatcattgagtacatactgcatcccagactttccaccaaagtggtgtgatttgtaagcatcagagcaaaattctcttcctgattgtatgaatcggtgataaaaatcttgaatgacatcaagcaagctttcacacacttttaaatatgctttgttttaaagtaggtcagacttcccagttggcatcacagaaaatggcccaagttacttttaaattttgcctaactgcaattttgtttgacagaatttcttctggaaagtggccatagaaggattaaatctccttcataatataattttacaatggaactacagataaaaacttgaatgtcagtattatatgtattagtgtatctccagataaacaccagagtgacatatttcatgttaaattgactggtcttatacttaagtgaccagggaaggaatatagctagaggcagaatgccattcatcacatattactttttagaaagcagtttcaggacctcattttttaaatttatagctttgattggcaaaactttttgacttttgaattaaaaaaattcatattcctagtattcacatagcattgttaatagaaagcccactggccaaatcgtttggcataatgtgcttgtgatttacacaggaggttgtgaaaggttttgtaaagactagcttgtttgagtatatcaaattatcatttttattacagctttttatttatcgtagtacataaaatgattttgagaaatctccaaagaatgctgatttgatacagattttgctgtgatacaattaacatttattgcaaatgcagatttttatgataagtaaattctgatatgatagtattaccgtagacttttttactatattcataatgcataaatcacattattctcaaatattttcagtcagaatgatatatatgtacatatatatataaacatagtcatagaggcaataaatgaaaagttagtgcagctcttctctctaagacataaaagttatgtttcattttatctcaaagagtctataaacaaagataggtgctacaaatttctccatacctctcatgacagtgtacaactctattcaatgcaaatttgatttttttctatgtctttaagggtgtgaatctttgaaaaaagtaatcaatcactatttgtttgggggttgtagtttgatatctcttttggaatacctcaacattatattgatcttataatcatattaaataaaatctgattcttcttgaggctttccaattacagcctttctttaattttttttttttttgtctctgttcatctgttttttttgtttgtttgtttttttgaaaattctagccaaagcacttagcactatacctggcatttaacaaacacttgatcattgttagctatcatcattatttgtgtgaatttcctattgccaatataacaaattactacaaacttagtggctttaagtcagcagtccccaaactttttggcacctgggatctgttttgtggatgaatttttttccatggactggggtgggtgtcagggagagtttggggattattcaagcacattacatttatctatggtgtactttatttctgttattattacattgtaatatataataattatacaactcactgtaatgtagaatcactgggagccctgagcttgttttcctgcaactggatggccccatctaggggtgatgggagacagtgacagatcagcaggcattagattttcataaggagcacacaacctagatccctcacatgttcggttcacagtagggtttgtgctcctatgagaatctaatgctgctgctgatctgacaggaggcagagctcaggaggtaacgtgagcaatggggagcagctgtaaatacagatgaagctttgcttgcttgctcactgctcacctcctgctgtgtggcctggttcctaacaggccacagaccagtactggtccatgaaccagggggattgggcacccctgctttaaacaacacacatttgttcccttacagttctgtggattagaagtccaacgcaagtctcaatgggctcacatcaaggtgtcagcagggctttgttccttggggctccaggggagaatccatttccttcccttttgcagtttctagaggctgcccgtgttcctttgctcttggccaccagcaagtgattgtatggcttagacctctgctggtgtagtcatacctccttctttgactctcctgcccctctctttcccttctaaggaccctggtgattacagtgggcctaccagaattcacagcgagatggctaacttaatcacctttgccatgtacattacttccctattgctcttgaaacaaattactacaacacaaatttattctcttacagttctggaggtccaaagtccaaaatcagtttcacttggctaaaaatcaagaaattggcaggcctatgttgcttatggagtttcaaggaggcaatctgtttttctgcctttctggcttccagtggccacctgcactccttaggtcatggtctctttctccatcttcaaaccaagagcacagcatcttgaaatgtcattctctgactaccatacctggttctgtggtcacgtttccttttcccttactgtgaccctcctgcctctctcttataaggactcttgggtttacattaggcccatctggaacccaagattgttcccctcaaatgatctttaacttaatcgtgtctgtggattaccccttgtcatgtcaagtaacatattttcaggtttcaggcattagaatgtcgactttttctggggacatttattctgcctaccccaccaatattaggcccagactctctcttaagcttacatttgaatctcccagccactcactgaacatttgtgtctagatcctctgtctgagtctcaaaaactatttttactatacctttttccagccccagagtggctcctcctacttttcctgtttcttccatttatccaagctgaaaaccttagagttagtttttctttgttgttcgtcaaggatctttactctcttgattttctggggttgtgtttgggagaatcggtagaggaagatcattggattattcagttacatatcatttcaataggtagaccatattattgtgcttttaatataaaattatgcttactgtgctgctgagatacaaagagaaagggagtgtttataaaaccattttttaaaatggctttcaatactatgaagtatataggatgtgtattttctggacagttttatatggatcactgaaattttgcattgaatggttgttcaagaatgtaagtccagtgtaattcaagggatattagtataccactctgagatagacctcctaatttgcctgattacactaattcctaaatgaaggatgcagaaatcctaacttctacaaagcagaagcttctttccatttgttttcaaattttatatgaaggtttagggctggacagcaatttggcccatggagatggtgaaatattttcttctttggtggtgaaatctgtaaatggtgaattttttcttcttccttcagtgggaatctcagagtagcctcacactgtttttctctgggttgctgtcttgccttcacttgtctgcagggcaggtaccaagaatcaatcaggagtcagtttgcgtatttaaagaatgggagtgacatgaggggattgtctcagtggaaactggggagagggacagttactcctaggaaaggaagtcaatgaaaatgggcattctttcagaattcaacagggaggagaaattttaaatacagaggagagtctgttactcaatttcagaaaccccatgttgagattccctgagacacatacaccaagatgggactaaaggatcagacttataaaaagaaactggagaagtttttttattaaaaaaaaaaaactggaaaaaaggtgaaggagcagaaatgggcagagagcctcagactgcgagtcaggtcccatgttggtgaacaaagagtggggaggaaaacttgcttaggaagaatgtcagactgcagcacagttctgaggatgctgtagctgtaaaaatggggagttgccgagccaaaattgcccgttagagaaatccttcatggggcaggaacgagccagcattagcacctccattcagttcagtactaggagcagcgcagggaggtgtgtggccacagtgctcctggggtagcaggtagaggccatcagtcaactgtgttctgtgctttaggttctcttgaagtgaaacctaagggggaacctccatgtctgcaccagtctgcaccttgatttgtacatatccacttcatgttcattttgggagcagccttaaaatgattttaattttggcttccttccttcttctaccagtcagtcatttcctgtgtcatataggcaaagccaccacagtatctctataactacataataatgttttaagtatcaataatgttaacctttggattaaaataaacattataaagggagttatgcaaacattttgagttgaacattttcaatcagaattatatttgtgatatttattccaagtgttgcatggagttattgttcatatattcttattactgtataatattatcttgcatgaattcaccagattttaggttttctgactctgagtcagagttctttttctcaaccattctttttggtataaactgggttaataggattgactttttattcctaatgccctgctaaggcctgctatattggagaacagtagatatctggctgggtaaaagggagaaggacaaccttgttagtttcatgtgtggaacactttggaaagcagagaaagattgctttccctcctttactgcaaagtgaggttgccggagcagcaggaagaccctgaagggctcttgctacaacagctgccagttttaacaactgcagaacaaactcaacctaccttgctagtattattttcctctatggtttattcaatactattgcaagagaaaagcatcatcaggataggcctgagaataaccataatgtttgagatgcatttgtttcatacaacccgataagtgactttagagctcacaacttatcacatgactgactgaaatttcatgaaacattataccaatatgacagcatgatttaaagatcagtttgaggttaaaaccaatgtttctggatgtctgtataatttgcaattggcttgctaatttttggaaacatcaagcatttgcatttgcatcgtgaatgggaattagtcatcatgttttatttcttctaggtccttagcatgttctcttctctgctggccttttctcatgttcttcactctacttggagtgcttttatccctgcttgttggggtgttctcctgtcctttaaggcctgttcttcagccatgaaagaatggcacctgtccttcctctaaaactcatgggagctctcatctaacccttctccttatctcattgttatttgcatattgatttactgttccctttaccaaaaagaaagaccttcaccataggaattatctcttaaatatatttaaacttgttattcattaaatttattttgattccatgttttccaaaagtttttttttttttaaactctattgggaaagcactacagtaatgaatcaatacagtagagttaatgcaactaagagaaaatagggctcaggaaagcaggaagccaataagccaaccacagtaaccgtgcttaaatctcaacttggcactgaacaacctgggcctccagaacaaagtggcatattattatctagccctcattatcataaaagagaagaacaatggttcctttgcagaaaactgattcaccttggccataaagttcaagaaaactctcatactgtactttacatagatgttagtcagtagcataattgtatccttaactaactccatgaatctttattgaggccctactaagtgcctttgagtgtttcattttgctaatttggaggagggggaagggcaggtgaaataaaaactaacatcgcttgtttaacaagtgataggaggacagacaagtaagcagaatgttacatactgataagcgttttagttgaaataagcttagaattactctgtataggagcatcaacccagagaaggaggattaaaggagagttcacttgaggaggtgattcctgatgttggaaccaagctttgaaaaccatttgaaggttatctcaaagaatgtggttggtgttgaaagtagagaaagccaaagacaggacagagacaacaggagttgtaggccccagaagcagcacgtgcaaaagactcagggacaaaagagagcatggggcttctccgaggctaaggttttgagcaggaccttaaccatgaagggcctcatattcaggttaagcaattttgcatgatgcctgagaggttaaagaacttcgccaagtttgatgtcaggaattgacatgattagattgttaattttgaaatatcatggtagaggcaggatggagatatgaactaaaactgagcaagaccagagaagcttgttagaaggtgtctgaagcagagatattatgacagtaataatattgctcccaccaggatgctaatcaacggtgtcctctataataataaagaataaattgagagttatttcacttaactgcttctcttcatggcctgcaacaaaaacactcagcactacttggaagtaaagttgatgtttgtatagatacattaaggacacaatggaaaactgtccttaatgatggaatttctttctctcttcaacaattttattagaactgtcatatgcttggatcttcaatgaatacccatcgtttgttgaagaagatagtcggagatttgtctcccaggagacagggcacctctacatatctaaggtggagccgtctgatgtgggaaattacacatgtgtggtgacaagtatggtgacaaatgcccgagtgctgggctctccaactcctttggtgctacgttctgatggtaatgaaacttctccaagtgcacttctgagcgtaaatggtgctgaggctgcaaacaaaagcaattgggaaaatgtaaaaagtacatctagaagaattgtcacttcatgttttttggcacagactattttatgagtacaatgacaaaaatgatttgataactcatagtccttatgcataattcttaccccgggcaagcttcataatttgcagggaccagtgcaaagtaaaaatgagtggcccctttttcaaaaatcattaagaattttaagacagcaatggcaaagacttataccaagcatgagacccttctgagcccggggctcgggttgcactcccatgaagtcacctgtcctgacttttgccagcttgaggtttttaaagctctggatattttgttataggctaaaaatcatcactaaagaaaccattaaagaaaaatatctgtttcatcaacaccttgatggctgtttaaggggagtctatgagctgccgaggaagcagatccgtaagcctgggtagttgacccatttacacaaaaccatatctgatacagcataatgctatgaccacaaagcattgaagcacttttttccagtcagttataattgaatttgacctttcccatttattaagtcattgtttcttaactccagggagccatttaataagtttaagattggtatctctgctactagggtatcattaagtaaattccctgccataatttttgttctttagggaaatttcaggaagcaataatatattatatatttcagtttgactagcaatgtcaaaattgaatacacaatttcaaagcctcccattttgtgtaatgtaaaggctcagtggttttcttggaactgctctgtacgtggtaacctatgaatcagcaaatccaaagttcttaaatgtttattaatattgcatgtttgacccaagttagttcaggttttttaaagctctggatgttttgttagaggctaaaaagcaccactaaaaaaattattaaagaaaaaatctgtttcatcaacaacttgatggctgttaaaagggaatctgagctgcatagactaaattttatttaattgaaatcactagaagagctggttcaaaatgggagcaaaagaaagttttatttaagaaaaacgaggcaattctaaaggaaatattgaaacgattaactttatattgtggatttataggtgtgatgggtgaatatgaacctaaaatagaagttcagtttccagaaactcttccagcagctaaaggttcgactgtgaaattggaatgttttgcccttggaaagtaagttttataacatttactcctatgtgctgaaatattaggttgctataagaaatcaggatggtttttgagagactcttcttttttattttctaaaatttactttcattttgaggcaaaggaaaaacaaaatgcaggggaaatgcacatataaaattgagtttgaaactttaatattcaaagtcgatttgaagaaaattactctgcctgccgaatttcataaaataaattggtgggtttttttttttcttgttcatttgctgtaatctaatatggtgggtctgtattaggcttttttctcgaaatcatgtcaagaaaaatgcagtttattttattaaaatatcaacttaaagagttaagttaaatcttttttatcaggtttatataattgaccattgaaagtggttttctgcatttaaaatcctgtgccttcttgttcaatcttaaaagctttattttctcaagttgaaaaggcttccagacaatagcagacaacttgacgattttcttcttagtcccatacctcagattaattggagaagaagtgatgggctgccattttccagcaaaattaaattaaggaagttcagtggtgtgcttgaaatccccaacttccaacaggaagatgcaggttcctatgaatgcattgctgagaattcacgaggaaaaaatgttgccagagggcgtctcacttactatggtgagcatctgctttgggcaaattggagttttagcttttactttctcatctataaaatatggttgttatttaggggtgagagattatagcagaatcccaatgttcaacttgttggttaaacattttgttaagtgatgataaacattgatcatagggggaattaaaaagaaataaatttttgtaatgaagttggcgacataatatattcattttgcattttaaaatgattcatgcaaagataaaatatttcatatttttttcctaagaataacctctcacacacttaaacacattagagagagatctcttttctgtctgtcttctcctctagaaaacaggttttgtatctttctttgttacctctactaaagagaaaaaaaaaaaactgccttttgggaaaagttgcaattactgtattaaacaaaccacgtgaactctggctcttgttgagttcttcagtgttattctatcccttccaataatgtatctgtactctgtttgctgcctttaatttgcaatcacttttatttgatgtactgctcaatttgggtaaggaaggaataataatgtcacctttatttagagtctatttgtaggaaaattagattgcctttttttgaaatttttttcaaacctcttattttaagaaaactaggtttttgatgaaaacatgacttagaataaatatataatttttcaaaacggatttataaaatatatggagacgtatatattcagctcagtgaatatatatttgcactttaatcattagaaacatcgcaaaactagtgggaattgaccactcttgtcaaaggtaaattgcattatattctatttattttagaatttggaaattgaaacatcttgcaacacgtccttggatagcatatgtgcatgttgcaaggaagaaaagtttgcaaaggcaaatactaaaattgtaggtcttatgacaccccgccttgaaaaatatgaagtctaccagtgcattacttctggcacgattaacacttgttattatattgtaagattttaggatctgtcagaaacaaaatggaggcattgtttggtagcatgagtcattctgttttgtaactctcccatcttgttgcttgattagtttagaatgtatatagcacagaacttacccaggtttcaaggtctttgggttcctaggattctatggaaatagggggtgagggagcaagcacttaacccatgtggctgtccagctctaaggccccaacaaagcaagtaaccttttctcatactctagcttagttccttctttctgcgcaaccactacttgatctaggataagaagtgaccattatgggaacacaccggatattccaactgtattaatgttttagtagaaatatttttagctctatataacagaaaccctgtatacataataaacaattgtatgcttcatatgatgaggaaatccaaagctaaattgtcatttaattaccttatcatcaggccacgacccagtttctttgtgattactttttctgcccttgtctattttttttttccttttctgcatgttagtttccattatgatcacaaaatggctgccagcagtgactagcacatcagttgttactcatccttcctttctccaaaacatctagaagtcctctcctcaaacctcactggctacatggttcattcctaaaccaatcagtggcaaggagaaattagattagacaattaagtgcttcactttggaacagagaataatgtcatgtttctatagacaatgtgaggtgatggaagagtggacaactgaattaaaaattggtgttattttaggaataaggaagagaggaaatgaatgcacaatagaaaaccaacagtgtctgctctacttagtaaaagaggtagactattgctttagtccattgtgtaggtaatatgatacatacctaaaaaataaatcagaaattaatggcataaagcatttcatgaaagttgccttacaatttctatttaacatcaatatattaagtagaggccatgcagttctctggttatctgctctaatatttcatgtaaaaaatagtctatagaatatttgcatctcatatgatggaataaagggagaaatcagaattgatgtggcagttatgatttcaggattttttagtccagcgaattatcctcccatttggagaagaagagtattactatgggaagcttgtgggattttttttttttttttagaaactcgggtctctataagaggctgatgtgtgagtctattcacagtcatgttccatctcaggctgatcattcctgaaagaagaagaaaatgtgttttaatatagagagaagtgatttggtactgaactacacttcatactgagcaagttatatatatatatatatatatatatatacacacacacacacacacacacgcacacacacataaaagagaaaacttagatgaatacattatctgtaaaagctaaataaccatagtttcttttcagtttcatttataaaaaagtaattttatgagctagaaatggaaagacaaatcttcccatggttgcagttaaatagaaatagataaactgtttctccatatggaggatgcaaatgtgaatcccacagtacacatcacatgcataatgcaatgtgaaaccagtaaggcatctcacctcccagttttggatttaaaacacaagctgagacttggctggatatactgtatatagtaagtgactttcattgtaagtggtacgatgctttcatctgtaaaatgaattttccaaataccctctaaagcataagttgaaaatgataaatccatttgattgaacttatttgcatacataatttaaagttgcatcagttacttctttttctggcaaaaaatcacatgattcaagttgaaccaacttatccatcttttcctgctttgatcttaattcactcagaggttcttaagatgctcactggtttgtatttaattaagttatttctaacttgtggaaaatattttttcctcggctgtagcagtttctctcctatggatgttaatttttagttcataattaagaacaatatatgctgtcattcacttattaagtcatcatcagttgtgatctcatgattcaaaaatacacttggaaaacaaaatcagttttgtgtacctgtattactgtctactaatagatatctaaataatatagtacagtgctcagaattttgaaaatagagagagcataattaatttgccttaggaaataacagattgcaacttccatcctcaaatgtagaaacgtttcatacagccaatgagtagatacttagtgaataaaatataattctagcctctgttctcacttcaatctgttactcattatcatgtccatttctattaatccaggtaagataataaaataataaatacattttatttgctgggtggtttaaatttcttttctttttccttttctttcattgaagcaaagccccattgggttcaactcataaaggatgtggaaatagccgtggaggacagtctttattgggaatgcagggcaagcggcaagcccaagccttcctaccgatggctgaaaaatggagcagccctggtgctagaggtaaggtaacatggacctaaaatgggtttagaggcctggtaaatccaccctttcctcacttggtgtttagcaaatgctttctttagtccctagtcccaaaataaactgttgagtttgcacactttcctttacttctaagcagtggtacaggaggaaaaatatcaaatcaagtacccagtctgccagtgaggagagcttttcagcatggcatttcactgggaagaagtcatggtgtgaatttagtctgtaaaataatctaccgtttttttggtattgaaattagagaaggccttactttaatcaaatttaggatataatttccttttcctgtttaacaacttggtgtggcctctggggaatgaatgtatctattacttggttaccttgttatgtaagtacttattttctccatcactctccttctcaagccatgtaatttttgccctttttttgtatactaagtcaattgtgttctttcagtttccatacctaacctttcatactacctagaaactctggtaaatatatgtgtttcccagaaacctttctaatccacagatttgataatgtttttaacttgcatgatttgaaaagacatagtgaaaacatttccaactgatgggataaaaatcaacctcataaaacatgttttaaagtcacggtacctttttaagaaactttaactgtaggggaaaaagtgaaatggttgcatattttacctctgctttgttatctattttatgatatacttttggattgaaggatgctaattcatatttctaatgtgtagctattgtgtaaattagtctttcacatttaaaataaggaaaaggttaaatttcaggccatcctgtctaatactctcagaaaaatgcagaaagtttctgtgtgagtgaaatgatagtcagttcatttttattctaaagtggtatgtttgtttatatgaaagatatttttattatcatctaggagagaacacagatagaaaatggtgcccttacaatatcaaacctaagtgtgactgattctggcatgttccaatgcatagcagaaaacaaacatggccttgtttattccagtgctgagctcaaagttgttggtaaggctgattttctctgctcttctcttaattttttgtcttaaatccttcattgtttccagaagcagtaatatttacttttcacattaggttcctacatctaataatatctacagtattacaacacgatcattcagtttctaatcaaggcataccttttaacagtttctaaggaaaaacagcaattatggccagaattgaggaccaagggttaagttaatcgacagtaggaatcaaatattggcaaaagatatccttatccacctccaatattaccaactaagcaaagccttttaggagaataagtgattttggtgttccccgttgctggtccgtaatagcaaataccaaaatttgaatcaatcgtatttgattcaaaagagttgcctttgcctttagtggctctgttagaagcttgacacattggataccttgaggctttcattgtccaaggctccactgcttgaaattatagatgatcttcttcttgtactttaggtataggagaaaaagaagatgttctatcatgtttaaagcaattgtccagaagaatatttacattacaaatgattgaaaatccaagcaaaacaccatggcatagtgtagcatagcacaaatgaatggaaggaaaggaggaagggaagaggagcaggagggcttgctcatcagtccatgttattaaaatggagaatttggatttcagcataatttggtccagtgttcaaatatcatcactattatcaggttctatatgatgtttcccaacaaaatgaatgtattaccacagtcattccagtggaagaaagacggctgtcttaattgctcaaagggaagtcaaagtgttgcatgccattggccccatatagcctgatttgggttaatacttgtttctgaaccaatccatatggtcagcaagtgataaggccctgcatgatttaagtcagtgtttctcaaccagggacaattttgccctgagggaaatttagaaatgtctggagatatttttggttggtgtggagaggtagaggaccagtgtgtggtattagcatattgtgggtgaaggacagagaggctgctaaatatcctacagtgcacaaaatagcttctcacaaaagataattatccaccccaaaatgttatatgtcaagagtgattgaaaaaaccctgctttaatgggctctctcatctctagtgcctggcagttagaaatgcatcatctgtaccaggaggaatgatgcctggagggatgatcaactgaaaatctggctgctgttatccatgacagagaagtagcatattatgacaaaaagagggaggagtttgcatataagtcttaacttgaaagactgtaattatattgcaataaattaagctgatgagccatagtttatccatctttaaaatgggtggagtcctactcaatgtatggtgtgggattgttgtgtatgaagaaatacgaggtgcgtaaacaaaagattgtattcaaatataaacaagtttttgttttaacaaaaatcactcttttatgatttttaatttttaaggccaacaacctctggataccatgttttctttaccacaatcacatgtataattacgtaatatgattcactctaagatttccactaatcaaataaataaattgtattcacttggatttgccataagacacagcattagctatttgggaaatgcagtaggtttttaatgtttttcacatttgcagcaaaaggaagagtgattttttttttattaacataccctttcattccaatgatacaatattatgtatcttaaatgttcaagtgttgtttcaggattaacatcccatgtattattagcaaatgtaatattttctacacattattatacttcatgcaatattatagcatttaaaataatatgtgcgtaatattatttttccccagtttggaagttcaacctaacaatttaaacattttatcgtggaacttgatacatgcatatgtatgagaatattaattcagtgcttagcctctgttctcaaagttttgctgagctttgttgaatgctaggcactgtaccaagtgctatgtcctaaaggttagcaagagagacaaccctattcctgtcttcgtggagctaacatttaaaaacgttctataccaaatgttttcctttcatttaataaacacatgattgagctactttgaatcttcaccataaactaaacatttctgtataaagtaattgtctcacgatttagacttgctagaaaacataataacatgaattatcctgtgtgtggcacacaataagccaagtaaatcaagcactgacaccctgaatgtaaagaaaacttttaaaactgtaaaagtggacctttgaaattgacaagaagttttgtaaatgatccacttctccttctctcctttcttgcctttcagcttctgctccagatttttcaaagaatccaatgaagaagttggttcaggtgcaggtgggcagcctggtcagcttggattgtaaacccagagcctccccaagggcactctcttcctggaagaagggggatgtgagcgtgcaggagcatgaaaggtattttgatgtccagaaaagtggtcatttactttcctctcactttccatactgatgtcaacataggttttaaatatgaaatgaaacaaaatagcatttcagtagcatgtgagatctttaagaactaaaatagtagtatttttgttctttaatacctttgtaagagtattcagttttttgaaatctaaacacagaaaatatatccaaggtcttcccacatagagtactttctcttaacaaggattttcttcctgaatcgctgggaagactcaaccagaatgatgaaggaatgttgatcccagaagcagatccacatcccaggacaaagaagagaaggatgtataataacagcacatgccaaagaaatacaaatattgctgttatcctatactcaaataatttagcatgactggtatttagtttaagcaaaggcatccctgatttcctggctgtaattataacactgagatgaagaagcaggatggtcttagtgaaaagcacagactctggagctagaccacctggattcaaatcttcatttttgcctttacttgctcagtgctgtgacctaatctttctgtgcctcattcccttatttgttagtgggagtgataatagttcacacctaatgtcaagaattgttatgtggatgaagtacataaatattaataaagcacttaggtaaacacctgccagaaagtaagcgtaagtattggctgttactgctgcttatctattataaatttactatatatttattatttattattacagtttattgagtgtttattgccagggattatgctcagagcttgtgataagcagaataattggccccaaagcatccctctccttatcctagaaacctgttactgtgttatattacatggcaaaaggtaattaaatttgaaggtagaattaaggatggaactaaagtcttagcagttgactttaaaataaggaggttatcctggagtatctgggtgggcccaaagtaatcatctgagcccttaagagaggaagagggaggcagaaggattggtcagagagctgtgataatcacagaagaggcaggagagacctgaagcctgagaaagaccctgatgagtgttgctggctgtgaagatgagggaaggggccagcagtaaagaaaacagggaccttggttccatgaccacaagaggctgaattccaccaacaacctgaatgagtacaaaatgattccagattcagaaggaatgcaacccttctgaatgttgattttagcacagtgagacctatactgaacttctgacctccagaactgtaagagaacaaattgatgttgttttaggtcatcaggtttgtggtcatttataacagcaataggaaacttaacacagaacactaagtgaattatcacttttaaatatttctgcagctaatgaaaaaacagaaacttagtggaattaatttgcctgaagtcacatagccaggattgggagccattctgtttgactctaggatataaccactaagctttatcagtgccacattttgtacagggagcccagaatctttgaggtggtctcagccattgaagtcatagagtccaaattattactttggaaatgaaaggaatacaaacaaacaataaaaccttaggccaagaaatgtggatttgcttttctaaaatatcacagcatcagattgcacatgaccaggttgaacggcttttagattttagccccaaaggtatatttagacaagttggttacaacagcacaatctgcagttcctccagtatttagccgaagatgccttcattaaaaggcagacacagcaggatgacaagataaaattgtgaattgagtggttcaccataatccaaccaaatgctaggctgcacagaatagatttctggaacaggaggttaattagtgatttgcagtttgattttgtaagccagtttaaacaactacaggcttgtggcacaaactagttaattttggctatgctagaagttaactcttcatatggaactcatgacatttttgtgttcaaaaatttttaattgattcaataatatacatgaattaaatagagattatttcccatggatatcaatgctttgtacaatgctaaatcaacttgtcctcatagtagcaaatatagtaggtagaggcttttaatcttaatttttaaaggggataaaaagattaagagatttagctagtgatacacaaggagatatttatatccacattgtatagcgatggtgctggtaaaagtgtgtaagttccaggatctaacctggaatttctgatttagccagttaatactttaatctatacttaatacaagtatagattcgtggcacaaactatttaattttgactatgctggaagttaactcttcctttagaactgctgacatttttgtgttcgaagatttttgaacacaaaaatttagtgtcattagatcagctatgtaatacctctgaacctccgtttcctcttccataatatagagataatatatccttccttacatagtcgctgcaaaatcaggatttagcctgatatttgtacatatacatatactgatctataagaatgagatcatgttataaataaaattttgaaagtaaaagtggctgaaaaagaatttttttgtttgttggttggccgttcattggttggttggtcactgtgaaggctgacagtcaaggctacctggactctccattcagcagggatgcaggccctgctgtcttgctgtcccaccactctcaactcatgaaccaaaaccactgtttttgtgcctgcctcccagtgacatcccaggcaacagcaaggaggaaggtagaaataagaatacacaacccaaatgtccaacaatgatagactggattaagaaaatgtggcacatacacaccatggaatactatgcagccataaaaaatgatgagttcatgtcctctgtagggacatggatgaaattggaaatcatcattctcagtaaactatcgcaagaacaaaaaaccaaacaccgcatattctcactcataggtgggaattgaacaatgagatcacatggacacagaaaggggaatatcacactctggggactgttgtggggtggggggaggggggagggatagcattgggagatatacctaatgctagatgacgagttagtgggtgcagcgcaccagcatgtcacatgtatacatatgtaactaacttgcacaatgtgcacatgtaccctaaaacttaaagtacaataaaaataaataaataaataaataaatcaaaaaaaaaaaaaagaatacacttccttccctttaagagtcttcccagaagtcccatacaacactcttccttataccatactaatcagaaattcattccctggccacatttaactgcaagagaaactgggaaatacagaatttttttttttttttatggacgggaatgcacccaataaacaaaattgagattgtgtttttaaggagagagaggaaaataattgctaacccagcagtgtctcgtggtaataaaagttagttctctatccctttcaagccttctgacactctgctttgtatgatatatttctaatatctcccctactgatcataagctttcatatatgaagatatccttaaaaagagggaacatatttaagagaggtccatggtgttccaatcctccttagatctgtggtttgaattttgtttttatctttttggacagcaaaaaacactgacgagccagggccttgatgcttagggagaagcctgctagaagcaattatcgaacaagttgcggacttgaaccttctccaagtccacgggaaatcagagtggccgcagtcatcacttggcaacgaaagccccatatccatccctcttaacttggtctgcaggcttcagccaaatcagaaaaacacattaaatggtagatttattgtggttgttagatcatggattgttacaactttaaaaatgcagattcaatcttatttgaaggagaaatgaattcattggtgcattaaagaatagaagacaattttttaatgggatatttatgacaaaatttgaagtgtatttgattttttagtttttttaagtggttaatttggacttgtcggcgaataagaaacttatgataaagatgaaagctttctctagcctaacatagaggccactggcagcaaatacattttgattaagccaatattctatatatgtatcattcaaggtctaaatcagaaaacaatcaaaggattaaatacttttcttaagcactgaataaactgaggccgagtgcagtgggtcacgcctgtaatcccagcactttgggaggccaaggcgggtggatcacctgaggtcaggagttcaagaccagcccaaccaacatggagaaaccctgtctctactaaaaatacaaaattagctgggtgtggtgctgcatgactgtaatcccagctacttgggaggctgaagcaggagaatcacttgaacttgggaggcagaggttgcgttgagccgagattgcaccactgcactccagcctgggcaacaagagggaaactccttctattaaaaaaataataataattggataaactgataaatgtgccttctatgtaaatcgtataatagatttgaataatcggccaggcacggtggctcacacctgtaatcccagcactttggaaggccgaggcaggcggatcacgaggtcaggagatcgagaccattctggctaacacggtgaaaccctgtctgtactaaaaaatacaaaaataattagctgggtatggtggcatgtgcctgtagtcccagctactcaggaggctgaggcaggagaatggcgtgaaactgagaggcggagcttgcagtgagccgagatcatgccactgcactccagcctgggcgacagagcgagactcctactcaaaataaataaataagtaaataatcataatccacctggtttataaagttttatagcagcacaataacagctttgcaattatgaatcagccgtgatcatgtggatctcagtcagtgaggcacctaaattatagaatcactttgaagaaatgagagttgtttctttcaagtatggagagcatttcaagctagagtagtaaatggattactgcccaacagaggtcttcaaaaagctgctatgagtagataacaaaggcttatcctgcaaaaagtgattcctgggctcttacatttaagttcacacttgaaaataccttgagtacctactatatgctaggcactaggtatttattatttatcagatacatcgatgccattgtttgtagcttttcagggtatacagacaggtaacaggacaggtacaataaaactcaattggcaaagtacaggatgttcagggaatcacctaggaaggctcttatctccaaattagggatcaggacaagctctctagagaaggtgatgtctgcagcaggacttgaaagatgaccagggtttttgttggagaagagtattccaggaagaaagaatagcacgtgcaaaggtacagaggccagtcatggtttgggtactgccttagttcatttgggctactataacaaaatactagattgggtaatttataaataatggaagtttattgttcacagttctggaggctgggaagtctaagaacaaggcaccagtctggtgagggctcactctctgatgcatagatggggccttgttgctgcatcctcacatggtagaaggggcaaggcagctccattcaatctcttttgtaagggcactgaccttatacccctatgtcttaataacttcccaaaggccccccttctttataccatcacaatgagcatgaggtttcaccatggattttggagggacatattcagagcatagcaggtacttgagtaactgattgttcaatgggcctccattttaaggtgccatggaggggagtgttcagagagaattgggcagtagaggtaagcaggggtcttattgtcaatgacagtgtataccgaattaaggaatttgggctttattccacaagcactgggatgcaacagaataaaatcaaagtagaagatgtacaggattaaatttctgtttaaaaaagaggaccagcagggtgcggtggctcatgcttgtaatccctgcactttgggaggccgaggcacgtcgatcatttgaggccaggaatttgaaaccagcctggccaacatggtgaaaccccatctctactaaaaatacaaaaattagctaggcatggtggcacacttctgtaatcacagctactggggagactgaggcatgagaattgcttgaacccaggagttggaggttgcagtgtaccgagaccttgccactgcactccagcctgggcaacagagtgagaacctgtctcaaaacaaaacaaaacaaaacaaaaacactggtaccagcagatgggttgaagtggtaccaggactgaaagcaagatccctcattagcagcaatccacctgtctgagcaaaacagtattacagcctgaactaaagaaatgacagtgggaatgaagtgaagccttgaggagtttgagaaaatgttatatcaacaagacctgttgattagaggcatgatttgaagagaagacaggagtcgaggataaatcctagatttccaggttaggattcagggagcatggcagacccattcagagtgacagggaaccttatagaaatggcagaaatgagggcaaataggataagttcagtttgggattggttgagtttgaagtacctactgaaaaaccaactggatatatccgtgcatacaaaggttgactgaatctggaacttaggagaaagactcaggctatagaaacagagatttatgtgtcatgagcttggagatggtagctgagccattgtagtggatacaactttctaggaagggtagatgtctttaaatggtagaggctgtacagcttacctctgaaactctcgtacatacaagttatcagtagagagaactgtgttacagcctcatttaatgatttagtgattgatttattaaataaatgccaagtcacctggtgctcaactattctaaacgtcataattactggcattcagtattgagtaaaggtttttctttttcttattttggctttttttgtttgtttgttttatattggtattatacagtccaatattgggtaaagttattgtgctttttttctccctgcagcaagaaacattttggaataaacaaaaatgtactgcctttttcagtattccatagtatttcaccaggtgtcaatgtttttgtgctatttcattcattcattcacttaaatccacctatttccaaaagagacaaatcaaaactgtatgttttgtctcttttaaggaaactaacattgaaaaagacccttgagaatgagaacagacgtggtttgtgagaaagagccagttggtgtattttaaagattatttaacttatctctatcacttagtggtacttgaaacatagtagctaattatttttttaaatgggatccttcatttgaatgctattgcttataatagtaaatattttattgcaataacctcagtcagaagaaagtaaaagaatggctcattgcttctaattaacacattaaaattatttcaaatgttttatgcaacatttaatactattgaaaattaaatgccttttaaagaaagagtgaatttttttccaaatatgaataactataatccaggcaatgtttttaaaagatattacccaatcttaatgtatttcctgcacatagataaaagctggcattaaaatgcagtaagcattatatgctgtattattggatttatatgacatttttgaaaaaggagcagttttagggaaaaaaatagtgatcactgcttgccagaggctgggagtgggtgtagaggttgactgtcagggacacagaaggatttttggggtgagggacctgctgtagcccatgattgtgagagatgacatgactgcattcatctgttaaagtgcacagaactgtgcatcagaaaaaggtgtattatactgtatttaaattatgccttaattttattttatttaattaattaattaattttttttttgagacggagtctcgctctgtcccccaggctggagtgcagtggcgcaatctcggctcactgcaagctccgcctcccgggttcacgccattctcctgcctcggcctcccgagtagctgggactacaggcgcctgccaccacgcccggctaattttttgtatttttagtagagacggggtttcaccgtgttagccgggatggtctcgatctcctgacctcgtgatccacccgtctcggcctcccaaagtgctgggattacaggcgtgagccacggcacccggcctatgccttaattttaaaagttacatgcagttttacattcatctccaccctgatcaagtagttccataaaggagtttaaaagctcaagaaatgctcctaactggccacttttgccatttgtgaagcactgagtaatgtgatgatggtacttacaagcagaatctaaacttttgcaaataaccaggatgattctatcagagccaagaccacttagcatttctgtcattgcccctcctagtggccacagcctcgctttgataaagatgtgtctagaaactctgtcactatcaaacaaatctgttttaggtggcacttccccttgactcaagcttttaaatgaagaacagagattcctttgccaaaggaatgtgtctctctccatctctttccccttcccttacactacctggctcctctcctcacagtggagtccacttttcttcatactgttcaaaatgccactcccatctctctcagccttccactgcccccttcatccaaaaagcttgactttattttaatcttcttctacatccgtggtctacccatcaaaacagttgttccctcgcaactgtcaggtaggcgtgcaagctcagtgagtttcagtgaatctaccctcagatacgtagctgagatctcagtgagtcttttgcttttgtatcttacttgaatttctaactgttgaaccttgaagcacagggagaattttatttcatatgtggatgccatcacttttaaaaaccagattgattgatgtccctgccttctgcctagaaggaaggtactccatgttgttttctaatttatcatattgttatttttcactgggtattatgtccggctctgggaatacatagatgaataagagacatcaaggagccgtcaaaaagcccacagtctgtttagaatgtggataactaaaccatcaattacagtggaatagactatacgattaaggtgaccatggaagttattcaacaaactgggacattttagaagggaaagggggcactgttagtaattacctccaagacaacacatgtaaactaggactggctgagcacactggacattccatcctgcctctagtgaaggtgtttatagagactgttgccacatggtcttttaaaccagtaagaagcagagagaagaaatgctgtctcagccttgggaagcaggagagcagctccatgagggcagaaatctcaaaggaagggatgtaaaatgcagcaaagcaagagagtagggaacatgctgtctaaacagaaaggattacacaggtaagaagcaaaactgggtatttattcttttattccagttgtgtcagtggcaaagttcacatatgatcgtgaaaataagaaagcctggcttgagttcttccacagatagaaaaccatttgtcttcttcaaaggaggtgaacattggaggcagaactcttctcttaaagagatgattgagatgcctgggtaaataagcaagagttctagagagtagagcacagcttccttcctgacctggcttccccaacccatacctctatttctcttctgctttcagctggaaaaagaaaaggaatgaggtcctttgccaataactcccatactctatgagaagattaagctgatttaagagtgaagataatcaggagaagagtcaatgaaatcccagagtttgggtttgggatggggctcatggtgtgataatcacctcctctctctaataccctaccctccaccaccagcatatacttacaaatcttcccctattagccaccagacagcttcagtttctgtgtgggtatttgtatcattatttacatgaattattaatgcctaactggcatgcagtataggaattgcgatgcacattattcactgtgtcagatgaagttaaacatacgttttacttgcttctttaattttagcatatggaaagggcaaagcatggaaatcagaaagatgtgggtcagatcttggctgtgtcacttgccacctatggggtgttagacaagttacataattcctgagccttggcttccttactggaaaatgaggccaggaatccttaaacagagttagtcagcctcgtgggtggcatttgtgtggcacacactcttagtgagggatgagttaaagagattggtttccctgataggcagataaacccaaggtttcctgtggacaaattatttccaactttgtcgctgccccgtttctctcacattctgtgggacccccgcctttttaaaactcagtggattgcaaagatcagaataatgtgtgtaaagtatctgctataatgacttctctgtagatgctcagcaaaaggtttctgatgctgttaatatggctttcatgtatttatttatctacttatgtctttacttacttaattgtaggttcagagggcaaatgtgcaggtttgttacaagggcatattgtatagtgctggagtttgggcctctattgaacccatcacccaaatatagtgaacatggtaccctatgaaaacatggtttttcaatcctggtctccctgctttcctccccgcttttggagtccccaaagtctgttgtttccatatttatgtccatgtgtacccattgtttagctcccactttataagggagaatgtgcttttttttttattttgtgtttctacattaatttaattacaataatgacctccatctgcatccttgtggctgccaataacatgatttcattctgttttatggctgtatagtattccatgctgtatatgtaccatattttctttatccaatacactgttcatgggcaactaggttgatcccatgactttactcttgggaatagtgctgtgataaacataggagtacaggtactttttcactagaatgatttattttccattgggtagatacccagtagtgggattgctgagttggatggtagttatgttcttagttctttgaaaaatctccatgctgttctccataaggattgaactaatttacattcccactagcagtatatgtgttcccttttctgtgtaccctcaccaacatctgttatgtcttgactttctaatatagccattctgactggtgtgagatggtatctcattgtggttttaatttgaatttctctgataattagtgatgttgagcattttttcatgtttgttggctgctagtatgtcttttttattattacttaactgtttccatcatgttgctcagatgccttaagagtaataagtctgggctgaaaagaaaggtaagtacagacctttcttttttagaacaatcaactgaattgcacattatttcaaccttcttaagtaaattccacccaaatgttattttaaacagattgctgacacatggtctctaaaatcatatcaactaaattttgcagctaaccatgcagttcttagatccatatttcaaatttggttttatggatcatagaagttaaggccaccttaaaatatatttcgtcagtgttgtgattttccttggggaatgcaggttaatgaatctgaatgtgctggggatttgaatctacttcaagccagttcgttgttagaactggataaataattcatatctttgcccagtataaatgttttatttacagggagtaactacccataccatattcttttggtcatacagcatttctcactcaggcccaaaaatcccacatgcatttaaccatagaccaatccctgttctgtttccctgctctcacttgaaattcaaagaaaaaaatattaacgcaatcatagaaacgcccaatatcattacatgctacttttgcatttttttcttctaatatttttaagatgggggaaaaggagctttctctagaagtaagaaaattgactgttttaacaaaatcaagttgcagtacaagagttcatatatcattaccttttgaataagtttgaaaagaaaggagaagagaaagaagcagaattctccttgcattctgtatttgtagtcttgtggttttctctggctggaatgtcttttcttctcaacctagaaaacccttacatatcagtcaaggtccagctttattgttacttgctatgggaagccttcctggagctgaataggcaagattaattgctctttcttatgttttaccactttggtttctttatatattcagtagtatcatttaacacagtgtattatgtctgtttgtgtagaagaccatctcacctgtattcttgcaaagccttcaccttatccctgtttgtactctaagcctctgctctgtacatgtttgttcatttcaacattgatttattcttcaaatatttatttaacatctactgttcccattaacttttgctgcataacaaatcactctaaaactttttttttttttttaagagacagggtctcgctgtgtcacccagactggagtacaatgacatgatcataactcattgcagtctccaattcctaggctcacatgtgtctcctgcctcagcctccagagtggctgggactacagccatatgctaccacaccttggtaatttttatattttttttttatagagatggggtctcagtgtgttgcccaggctggtctcaaactcctggcctcaagcagtcctcctacttctgcctccaaaagttctaggattacaggcatgagccaccatgtgccctgctaaaacaatgtaatggtgtaaagcaacaatcattttatcatctctcaaggtttccatgggtcaggcattccggcagagattgattgacaaggcagtatttgctcagtgtgtctcctgtggctgcagtgggatgggggctggagacagcagctggaagataggtgtccattacagtctctcctctcatgaagcccaaggcctctgcttatggtctctccgcatgggtgagtgtaggcttcctatgctatcatggcctcagcaagagtcataatgcctacctagggcagctaaaggcattaagaatgaatgttcaagctagcaaggtggaagctgaattccctaggctctgaagacaccatcactttccctgcattccactggtgaccagtgagtcacaagctatccaaattcaaagggagagaagttagactttactttctccccctcagttttagtaaggtatacttgacaagtaaaaattacatatatttaaggagcagaaggtaatattttgatatatgtatacattgtgaagtcaataccacaatcaagctaattatcatatcatatctatcaccgcacatagttaccattttgtgtgtgtgtgtgtgttgagaacacttaagatcagctctcttagcaatttcaagtacataatacagtgcaattaactataattcccatgctgtatactagagctccagagcttactcagtctgcataacagaacctttgtcctttgaccagcatttctccatctcccccatcctccagctccaggcaatcaccattctactttttttttccaactgtaaaacattccacatataagtgagatcaaacctatgtctggtttacttcatttcacataatgtcctctaggttcatccatgttgtgacaaatagcaggatcttcttttttaaggctgaataatattctgtttacatatgtaccacattttctttagtcatccatcaatgaaccttttaatgggagagtggcaaggatttagtggggcaagagggttgagaaatactgtgttcaccttttggaaatgcaatctggaacacctaccacgtgctctgccatgtgtaaggctctgaggataccacagtgaataagacagacatggtctcttcttcatggagcttgcataaggaacagaaaaaatataaataagtggaaaagataaaatttttttagccataaagaaaaagaaactatcattatatggtacatttcaagaaaggccttgtggggtggacttagtggctcacacctataatcctagcactttgggaggccaaggcaggaggatcacttgaggccaggagttcaagaccagcttgggcaacagagggaggctcattttgcaagaagtgtaaaaaattacccaggcatgttggtgcacaccggtcgtttcagctatttgggaagctgaggcagaaggatggcttgaacccatgaattggaggttgcagtgagctgtgatcatgctgctgcactccaacctggatgacagagcgagatggagatttggtttagggtcacagtagtggcagctgagaaaaagagactgtgtattcttgaggtagagctggctgaattcatgcttatgacataatatttcctacctaatgatcacattttatgtttgttgtgcatgaattatacagctcccaacttggcctttagactgtgtcctgtgtgggaataattcttactcatacttgtattttccaaaacacttactgcattttaagtactcaacaaatatttgttgaagtgcatttcactctttcttggacagcttcccatgtcttaaaagtacgtataattttccagtttaatttattgcgactatttcttagaaatctaaaaaattgatttttgtatagatttctacttgaggctttctattaaaaaatatggagtgtgctatattttagtatgttcttccccctccctgaagcccttcatggaaacaggtcaggtgagtggatgcatggatggatggatggatggatggatggatggatggatggatggatggatggatggatgtcaaatgagatgtcgagtgaagtgccgtttccattgcacttctgtggaaaatacagattggtaatgatgatttctgcctcctatattgtgatccctggagaggacttactcataatttatgatctgttatacaaagtctatagaattgttacactgaggtaaatttctcactgcctcactccaaacaattcattttgtactatgacccattttccactttgtgatcttatttgtgtattttacaattctgtcctaatgcagatttcattgctcgagtagcatttatgggaagatgagagtatctgaccctttttgagtctgaaattctaaaaatatatatatataattgagaaggaatatataaaaatctatcctgttttggaaaagaagagagattattttctaaccttttacattcaaatactaaaaaagagacacctttaactttagcttaaagattattttaaacacttattttttcttagcatttatgaatttacttaagaaaatagtagtatttcaaagtttaataaaatcttgttttcttagtttagataattttataaacttatactttattgtatttatttctttgttactctagcctacttttaataactttatatcttctattctatttcatttacttatatcgtgtcgtatttcacaaagaattggagacagtttatcaaataatacacaaagtgaacactgaggagaaaaaatatgccagtgttccagttgcctagaatgtaagtttctttagaacagcataaatcctcaccatggaatctttattgtttatgacagagcaaggtccatgttaataaatatttgtggaatgaatgtatgaagttagtttacaaaatatataccaacttagttgagatccacaattttggctgagagctttgtggtaacaaatgaacagagaaaaatactgtgaattaacaatccacagcatctgtaagatgaaatgaaacaatgtgataaggagatacacaactcctcctggccaagaaatgttatgtgtgtgtccaaatccagtggatgcccacagagagaacagtgagtaatgtactacttatactcctcatacttaaagtaaaatacaatcaattttaaaggttacttcttttaccgctcacaacttaagggtaactgaatattaacactcaagactcttgaggaatacataggccacatttcttttagctaacttaccatgaatattatttctcaccatttctcattatttctcacgtatgtttttagaagccttggagtagatgttatttcaaggttatgctcagaatcaaaaacctgagatacagagaaggtgctgcagtgcaaatgaagagtcagatgcttaaacgagtccattgaactagcactaaagttttattaccttatgaaaggtgtgttggcccaccagaacctgcgcttgactagttggtgataaactctctgcttggaggagggacaagaatgttcaggttgtcaggactgagatgttactgggaaagcaaattgaagccctctatattgtatgaagaaatgtgtgactcaagacccagcttcttgagcaacattaccattttgtttcactgcaagataatttgtaaggaacccatcatcaaatgtacacagtcatcataaaagaaaatgtcaatgaagcacttctagaaaggctagcactgaagcagctaagacaaaggggttgcaaacctacttctgcgtcattggatgaatggaattgctagcagaggttcttaacctgaggcccatatatcttagatgatctgatcccctcctcagttgtatgaaaactgttattgtttgtgtgtgtgtgtgtgtgtgtgtgtatacgtatacatatgtgcacacacacatttgttctacagagagatttcccagatttttcaagtactcaaagaaccttgtgtcctagaaaggttaaaaacactgcgtaatggccgggcgcggtgtctcaacgcctgtaatcccagcactttgggaggccgaggcgggcggatcacgaggtcaggaaattgcgaccatcctagctaacacggtgaaacctcgtctatactaaaaatacaaaagaaattagctgggcgtggtgtcggccgcctgtagtcccagctactcgggaggccgaggcaggagaatggcgtgaacccgggaggctgaagcaggagaatggcgtgaactcgggaggcggagcttgcagtgagcccagatcgcgccactgtactccagcctgggggacagagtgagactccgtctcaaaaaaaaaaaaaaaaaaaaaaaaaaaaaaaaaaaaaaaaaaaaaaccactgtgtaaggttgtaaatgaactacttaaatattgatggatattaataaaagcggatgactttagaattggaataaaagggcaaaactattctatcttgcaagaactcaacagcagggcagggtgttagttggtccactgttgatctgtgataaaaccttgtcctctctacatagaagattatttctgaactcttcatatttgttgagacaacaaatatttattgaaaaaaactactatgtacaaagcaccaacatttcataatctgtatcctttaagggtttgtgaactctagctgagaattaaggatattacaaacaattattagctaagaaacaacctaacttaagaatgtataggaaactggctccagaaatcttggcagcaggcattgtaccatgttgttggagcaagtgctgggatgagtgaagtaatgattattttggtctttttgttgtaaatcagagtctgaagagggagagtccaatggacatagcttagaacattttctctcaaagcgcagtccctgtatcagcagcaccagtatcacctgagaatgtgataaaaatgcaaatccttatgccccatcccagacctaatctgatggtgggcccggcagtgggcattttgaagaatccgctaggtaactggtacacagtcaagtttcaaaaataccaacttatatgtctagcccatggctaggatacgacaagacaccgtgattcatagccctaccaagactgcattcaataggggcaaagaattcctcaaggaagatcaatgttagttgccaaagaatgaggaatcaattctggacagccaaaaaatattcagcatcctctacataccttgaggtgatgaaattccccttatgcataaaatgcaggtatcttgcactttgacattagtgtggaatgacttccattccagggcttctagtctctaagtagaaggacaatcactggagtaacatttggatatttctctaatgactccccagagaaagagtctgtctcctaaatttctgtagaagaccctgacactctagctcaacttttccccttctttctctttggtgtttgctgcacatagagagtggacgtattttgctgttctctttaccacgcaataatggggcttgcccttatggggagggcctgaggtggtctgcctgtgccaggaaggctaagcctgcctaattctggagtgaaatgtcaggaaaccattgtcgctcatctaagcagttttgcatcacctttatctgtaatacaactaataaagccgacatttttattttccctggttagactcatataactctctctgaggcatagaagaatagtagtgtcaagtatgaggggcctgtgaaccttaataatatcccctttgaagttttcttttaatatataagacatcagagaattatttgtctcatttgtctgttttcctttgtttgtgttactacttcgtgcgtctgagtatttataatttttccaaagactcctttgtataagaatgcaaatgtttcagatgagagtattgcctgggccttatgagttacttagatgatagttgtatataatcatttagactggaaatccccttataggggtcttttcttctattgatttgagtccattttagtaggaaaaactattcagtcattgtcataaaagtgattttggctctaaatatatttgtcatgttaatatgcgtttagcaacattttatagaagtgaaaatgttcctttattgttgacttttaacttatgaatatgtggacctgttaaatgatatgaattcattatctttccctaggttatagagtagagccaaggtccatcttctctaggtgtctgttccatagaatgtgtatgttcaacagaatcacagagctgcttgttattagcctggtacttactcaaagttaggttaattaactgctgatctcctccattctgcttttcctttccttggagatttactaaccaataaatcactatactaacactgctgaatttataacatgaaagcccaaaataggataggtagaagaataaaaacgctaatactattttcctaaatactgtttgcaggttatctttgaactcaaggagaagcagttatttcaccaataacgtgggggtgagagcagttgtaaatgagaacatatacagttgtaaatgagaacatatactctatggtctttttctctcatgtttattttctcatacattttcatcaatgtatatttgcttttcttaactgtcattatttatcctgtaatatatgcattgtgagtacttttgtcttacatgtaatgtaagcatccatctcttagaatatgtactcagaaagtaccatctaaaagagccttgttattttctacacagcagtttaatcattacgatctcatgtgattgcaactccactgagatatgcttcctgagaaaatgtagagttgcagtgtgtttgttaaaattcaagttgaataaattaccgtaatgatcagaagaatataggcagggaaaaacaatattttcagaaatcctgctttgccatccgtaatgctttagactttttccattctaaaacacactgcattattatagatgcttaaatgtcatcataaagtacaggtcaatgttgtctagacaacagtatactttatgaacaaacaaagttttttaacagtcataaatttaatgccatcactataattacaacatgagccattagagcagcttagagcaattacatttacttatcccaaactaaccatagactgcacaaagttaagtgaaataattaacctcctactacaaaaggaagtaccaataaaaaggtacaaataaaagtatattataaaactgatcaaggagttaaaatgccacagtgatttaaattgcacatttccctaagcaaactggagcactgaatgttaatttcataaattgttttttaacgttttgtgccaagacaggagtcactcatcgttatctacattttcagctctacgcatttgcagataaacctgttctcagaaagcttagaaagcaaattcgtttatagtgaagtggtataaaattttcactttgaatctctgtagggaagcgtgggttattgaaggttttctgttgagaaacaattactccattcatttactgaatattgtttatttttatgttgtgcaaatgccctgtgggcctcttagaacttactggaagaaccaatttaggaagaaaatatccaagtagttcaaatttttacaatatacatagagtttgcattctttgagagtcaatatgtttgctttgaagtctttgtgtgattctgaaggtgttaggttttgtctcatttcaacatgggcatgatttgcttgacttgaagtttgcttaattaaagttactaaacctaatacaccaaaggatttgtagttcttcctctattcctagcacttctgtatttgtagtggaaacttagctgttacactaattcattgcatagaagatacctgaaattacctacctctgttttgtagtttccaaatcagaaaatatcaatttaagttcaataatgttcagtcaacaagaggcatttttactttgttttaaggcttactaatcatagaagtggtagatccccagcttcttgaagcttcccattctatctctaacctataatttagggcagattaatttgccttattatttaagtatcttcccaaacttctgatataatctgccatcttctggtctttgcatattaaaattctccatcacatctgcattttctttttaataacaatgataggtaaaatttccggagcaacactataaatcaagtgtcattctctttgggtgtcatggccccaaaattttactgatgggattagcgatcagatgggttgggagcatggctcttaatcatgctctctctttcctccaagacttctctgacagtttcctctctcactctttttttccatcccattatcttcagtctctccctctctgtttacttattctctaacaagtacaagcatattctcagttctcttatcctgggaaaggcatttctaaattctctttattcagtcttctattgccttatctttttgctacatatatgtaaacaacatagctacatatgtgtacatagtatttccttgatatccaccagacccccatggatgctcaagcccttacacaaaatagcttggcttttgcatacaacctatgcatatcctcccatatactttaaatagtctctacttacaatacctactaatatgtaagtgctgtgtaaacagttgttataccatattgttctgtcacttgtacttttttattgctgtattgttattatctgtttattttaaaatatattctatctatggttggttgaatctacagaatctgcagatgcagaaaccgcagatatggagggctggctatctatctatctatctatctatctatctatctatctatctatctatctgtatccaattagttcacacatatatgtgtgtgtgtttgtattagtctgcacactttctgaatctatttgcttattatttataaggtgtcagtgccttgcaacccagcttcactagccccaactcctttacagtgactctctaaaggcataccgtcatttactcattcaacaagttttatttttgaatgtctactctgtaccagacacttttcaagggtctaaaaatttagtggtgagtgagctagatattgtcctttcctccagagagcctacagtgtactggaggagaaaaatattagtcaaataagaacacaaatatgtaattggacactcgatgggtgctatgaagaaagcacagagaatgttttgatcaaatacaggaaaatcgaatctaactcatggtttcaggaaagtaagtaaagtctgaaggatgaatacaggtcaaccagagagaggaaatagtttttataaaggccctgagacaaaaagaagcaaaaaagtcattaaaagaaggcttgtgtgattggagaaaagcaagcaaggaaaagaattcatgaagtcatatgaagttagagagaggcagaggtcctgatgtgaggatatggttcaggcttaggatatagtctgtatctcccaggcaatgtgacaccaaagaggaggttctaagcaaggtttgcctggacagctggagggaggagggcaggatcacgtgatcagattgacatgtctaagttttttctccatgttccttaaaacttccagtctccatatcctaaatttttatttatttttacttctctgcagggtttcttctttaagttattattacatgctcattaggaaaatctttgttgtcagataggctaaggtataaagagatttttttaagttatttgattatcttttccagtaaagttatgggaggcatttcacactcaacaaaatgcattacaaccttcagggtcccacgagaagaatcaggtatgtccctttttgttttgttttgtttttaattcctaggaaagttcttggaatttttgacctttctctgtagttcctcaagttggcatgcagtgccatggttccctgatgagctttctaggtcattgctctcaaacctttttattttaaatataccttaacacagttttaaaaaaatcatatgcataacaaaccgtaatagatagctgtacccaggatcatgaacctgtgtgctagctctaattccaccatgattttctcactgaaggaagtgtaaccaggatgcaaatgaaagtgagtaatggactataaagtaatacatatataaagtgatgggtggcagtctcctatagtctactggaggagaaaaatatggagagagatatatacacacatatgtgtatacacacacacacgcacgtgtgtacacatacgcacatatgtgtatacacatatgtgcacgtgtgtatatatgtgtatatacacatatatgtatacacatatgtatatatatacacacatacacatatgcatatataaataaaacaaaatctatcttatacatttttatacagaaacccttgtagtaacatttttgaaacacacctaaaaattttgcaataaacatttttacagattgagatccttcattctagtctaatgtcctcagtatttttcctatttattctactgaatggcccagaatttggaggcatttagttaccatagttggcatatatgacgccatgctgatactggggttgcaaatatttttaagaagtttaccatccattttcactcactcatgtgtcaaaaataggagccataaaagataaagacactcaagtgttaaatgcattatgtggatagtaattattttaggaattcaaagaaagagaacataattatgagtagacaaattagagcaataaagatacagtgatcagattaatgacaggttaatcccatctcatttttttttcgtaattcaaatgacaccacttctaagaggcttttctgatgcaccctatcctagaaacccttcctcctaaagtaattactctctattgtatcaccctgtctatctccttctgagtacttctcaaaaatcagaacttcttacttttacttatttatttgttgttgatatggtttggctgtgtccccacccaaatctcatcttaaattgtagcttccataattcccacatgttgtgggagggacctggtgggacatgatttaatcacgggggcggtttccccatactgttcttgtggtagtgaataagtctcatgagaattgatggttttataaggggaacccctttcacttggttctcgtttcctctttgcctgccaccatgtaagacatgcatttcaccttttaccatgattgtgaggcctccccagccacgtggaactgcaagtctgttaaatctcctttttcttataaattacccagtcttgggtatatctttagcagcagcatgaaaacagagtactacgttgtctatgctactcactggaatattattccatgaaggtggagactttttgtgttgctcaccccataattccaggttctcttatagtgctaagtgtatgtaaagcactcagttatatttccttaattaattagtcagatgccaaagctttgagtactctaagtgtatactaagaaactctaaggtaaggtttattggatttgcctaggctcttttcatgagctcacaggggaccacccaaatgttcttttggaaaattacagtttttattggggcgatgtgactctcttagttcatagtaaaagacatgcagcttctcgtttctcatatactgtttcaaatttaagagacatagtgttctgcctactttgcatttctttaaaattgattaggctaactccatgaataatctaccacaacatatattaatatttttggaaaacatttgacacttatttgataagtgcatcctctcaactttggtgtaataagtaatgctgagtaaaaatactgaacaaagttcaaattggtggagcatcttttgtcatccaatgctgtgcgtgtgtttatgtatgtgagtgaggggtgaattttctttttttttttttgtattcccaaaaagctaaggactggttgatcatgccttaaaaatactagcttaaggcaacatgttctgtaaaaatatgtatattcatttggaaaaaaaatggctattatatatttatttatcttatttgtctttgctttagaatttctttgttaaacgatggaggactcaaaatagccaatgtgactaaagctgatgctggaacttacacctgcatggcagaaaaccagtttgggaaagcaaatggcacaacacatttggttgttacgggtaggtccatttctaaaatattgctttacatacggattcactgtaagatgtattattatgaggaaagtaactatgtgtttcacaatgttcagtacactatgaaggtagaacctgtatttgcacttatgttatttttaacaggtgaaagtcaagggaacaatatttccttagcacagcacagtgtgcaccagggagcacattagttactgtgctgggttgataggcaataagagttacaaatagcatatgttgatgatctcattctatttttttttaaataaaattctattatgtcaggtctttaggatacactttgtttttttcattatagttgattttttctggagatgttcaagtccaggaaataacaggatataaataagaattgcttaaagttgtggatatattttattcatttatccattcatgaaaaaattggagcacctactctgtgccagttgcttgggctgtatccttgagcacattgtcactaatactgtcctcatgaatcttaccttctataaaaggagaaagaaaataacagtaggaataagaaagaagaaaattattagaaggcaaaaattgtaaacaagaaagaggtgcatagtggcagaggtaagttagagcattagcaacaggatgatcagaataaacctcactgagaaggagagatttggaaaaagatttcatggacatgaaggtgtcagttaacagatttcttagtgataattatgcaagcagtttgtagacctcctgaggaattatttcagttggattgaaaagtggagtggctgcaaggttttgagcagagaagtgcatgatgttaaataccttttgatatatcagcaggatggttatgaggaccttggtgaggacgggggttgggaggaccaaaatctggctagactgagttaaagagggaattgactagcataattgtagacaacatgcataaatgactcttttgaagactttggtccaacgtagtgcaaagtaatgtggagtagcagtgggaaaatggggtcaagagaattttaattcatgatagacaaatggaaggaggtggtgatgacagggagaaagaaatgtgcatgtggacatttgcgttggggaaaaacagacattaattagcattttaacatagtacccctcctttttgtacctattctagcatcttttgtattatatctttcaaatccaggctaccattaaatgtctgtttagattttgatggtgatgtaatttctagtcaaagttggtgaaaacacagtattttctatttctacccctacatttcaaaaaacaataaaactaagttgaaattgattttgttaataataatataactgttgtttacacgactttaatttttaaacttacatgtcctacaagttcaaatatcctaatttctttaacaagaatttgtggatccagtgaaatgtagctctgcatcaaaatgcctcttttaatgttgaatacttttaattatatagatgtatgtatatttatgtatatgcatctacagacatacacagtataagttagatgaacagtctgcctgtgcaaatgtcttttatcacaataaaatgctgtttttctgaaaaattatttccccaatagaaccaacaagaataactttggcaccatctaacatggatgtttctgttggtgaaagcgtcatattgccctgccaggtacaacatgacccgctgttagacatcatctttacctggtatttcaatggggcccttgcagattttaagaaagatggatctcactttgagaaagttggtggggtaagttgtggcactttcctcatactttttatattgcatgtgtctctggcacattgcttctgaaaactgtctgacatatagacaatgctctagaaatgttttctaaataagtggttttggttgagtggttctcagttctgttttgatctaattttatttttgtaattaccagaaattgaacacatttacttcaatgtataattacaattacaattgatggatgttgtatttatagtaaatgttacttttcattactttgttttgttaatgtcttatggaaacgaagattttcttttacgggtgtttgttttcaacatgacacatatgtgatgaactgggagaaagctgcacttactaagtgtctcctccaggtgcttgatcccaattaatgtgtcaggccagggtacatcatcactgttaatcctcacaattgcaccagacattagcagtaagacgcttcattgtacaggtgcacaaactgaggactggaagtctatcaacttgcccagagtcactcagctagttagtggtggaacttcaagtccagatcggtgtgtttccacaacacaaatgctttctaatgtttccattctgtctcttcttttgtgatgattccacattagaaagatttacagattttaaggaaaaattgtcactttgaggggaatggtcaagaagtggcttaatgctggtgagccacccaggctaatggtaagcctcacagcatgtttatgaatctggaattgcaaagctagcttcccttgtaggactgtttgcactgactcaaggacagcttcattcttttggtaaagaggtccatggtggacagtcaagtctggttttgtcaattatggacttcacatacaggcctcagtaaagtagaaagccatatgatggtcaactcaactgtgttcatttgacaaagacttcttattaaatgtatgtatttgtatacatcggcatgttaacatattaaaatcatatgcaacttaaaggatggcgttttgagttgaattgtgtcctcccaaaaatatattcttaatgtccaatacctcagaatgtgaccttatttggaaattgccttatcgtggaagccattagttaaattaagatgaggtcatcctggattaaaatgggcccttattcagtataactgttgtccttataaaaagaaggccatttggacatagacacacaaagaggagaatgccatgtgaagcacagacacagaggagagatggaccaattaggatgaaggcccagaacagaggtgtgctgccacaagccaaggaatgcctggagccaccagaagctggaagaggcaaggaagaatttccccttagagattttgcagggagcctggctctgccagcaccttgatttcagacttccagccatcagaactgtgagaggatacatttctgttaagccaccaagtttttggtactgccttacggcaaccttaggaagctagtacagaaaaaagaaagtttttaaaaggaaaagagaaattgagacgtttagatacctaactacaattaagtgtaattttaggaccctttctattttctgtcatttattccgttttggaattactgcttttctaattgttctgactgattcacagcctttgagaacttcaccaattgctaaaatcttttagctttacttttactattgttgtaaatgtctatttatttttaaattgtcactgcttttttctgtcatgataggaaaaggcataggccatattctgagctagctctctactccatactcaggctgtcttacaagttaacaatttcttcttccttgggcctcaagaagaagcctaaaatgttactttcataaagaccctttacccaatctgggaaaggcttctctaatccagctcttctactacttttaattattgaagaattccatttgaaacattagtcacctttgccattataatgaagataattatgtttgtgattgatttctcagctggattgtgagctgttgataatagtttatccaatacggttcctctgtcttagctactgctaaataaatgtgtaatgaaagactgaaaaatccaaagtagtttgactgtaatatgcatcaaacagttacaaagaaacactaagactgagccagattgcagctatctttcagaaaagcttggagttaaaaacattcgagtttataatgtaatttaactatcttgatttacatagcactgataggttctaaagaaggcattaagtcatctctgtacaagtcaggtgtctgcaacatgaaatttcataaattaatgctaccgcttgccaattctgttctttctctaccatgctagttcatggcctaagaattttttgtgccattagtaacttaatattctcccatcagtataaaacagtaagccatacaagatgacattacccttaagcacaggcaattaagtaaatcagttttctgttgcatgagaagggaatcatgtaacaagtcttgtcctctgattgtgtattcattgcagcatgcacattaatacaaagatagtctgcttgcctttttccccagtgggttcatagatatatcccgtttccaaaagcagcaaaatgtgaacaaggaggctgataagtgggaaagttgcctagaaaggtggatagtaagaactatgttttaaaaataggttaggggtagttcaggttatagaaaatacaactcatagctttgaactgaatcagccaattattggaactatgctaagtagtcaacagccattcatttgttttaaaaaacacaggccttttggaaaaaatccataagctcagaaagctccaataatttaaaccagatctactgtatagatttgaaattgtgccaaaggagcatgatgacaccagtcacagatttttgcacaattggaataatacattcagaaaagctttatgaaactaagtgtctaaaacaaattggcacatcacaaaggaggagtaggtttcagtccatgatcatggggcgaatcaaaaagtcgtatcattaaatcagcaggaaaagacttccacataagttcctgtttgccaagaaaagttcaatcataggcacgatgtggttcagtttcggaagaggtggatttgtattcagatacacaagagttctgggtgctgttgtttgctggttgatgcccatgggtgagtgagtcacgtaattttttggtcttattttcggatctcttttcacatcagtttttagtacagtcacatgttgcttaacgatggggatacattctgagaaatgtgttactaggcaattccgtccttatgtggacatcgtagggtgcacttacacaaacctaatgatacagcctactacacacccaggctgtgtggtatagcctattcctcctgccctgcaaacttgcacaacatgccactgccctgaatgctgtgggcagtttaacagaatggcaagtatttgtgtgtctaaacattgaaatggtacagtaaaaatacggcataaaggattttcaaaaaggtgcacctgtatagggcacttactgtgaatggagtttgcaggactggaacttgctctgggtgtcagtgagtgagtggtgagtgaaggtgaaggctaggacattgctgtacactactgaaaacattagaaacactgtacacttaggatacactcaatttataagaagtattttctttcttcaataataaattaaccgtagcttaccataacttttttactttataaacttttaacctttttagactttttgactgttttgtcattaacacccagcttaaaacacacattgtacagctatacaaaaatattttatttatatccttagtcaataaggataagctttttttctgtttttaattttttttttcattttgaacatttttgtcaaaaatgaatacacaaaggcacaggttaccctaggcctacgcagggtcaggatcgtcaatatcactgtcttgtgcctccacagcatgtctcactgggaggtctgcaggggcaataacatgcatggtgctgtcatctcataggacagcaatgccttcttctggaattcctcctgaaggacctatatgagactcttttatagttaacttttttaatttgtagaagaagtacactataaaatgacaatataaagtatggtatagtaaatggtataaactattaacatggtcatttatcatgattatcaagtattatgtactgtacataattgtatgtgctagactattatatgacaggcagcacagtaggtttgtttacctcagcatcatcacaaatgcatcagtaaggcattgtgctgtaatattatgatggctacagtgtcactagtcaatagaaactttttttttttttttgagacagggtctcactgtgtcactcaggctggagtgcagtggcacgatcttgactcactgcaacctctgcctcccaggttcaaatgatcctcaaggctcagcctccctactagctgggactaccggcatgcaccaccgtgtccggctaatttttgtatttttagtagggatggggtttcaccatgctggccaggctggtcttgaactcctgacctcaggtgatctgcccgtcttggcctcccaaagtgctgggattacaggcatgaggcactaggcccaggcagctccattataatcttatgggaccactgtcatatatgtggtccatccttgaccaaaaagtccttatgtggtgacacgtaactgtatttatcccattctctcctgccatgagatctcttcctggaacacagttttctctctttttttgcctgtatctagatatcttcatatatgatggtgtgaatgtaaataagaatgtgtacactatttcacatatgcagaatcacaagaagagatacaggcctagctatatgtttatggtagtgttctattatacctatatttaagcaatgaattttactccattatttacccctgtagaacatctttgtttccttacttttaaatagagcttagcatccatcgataggaaaagggaggtaatattccaaagttcaagagaaaccaaagaacactgttgactggtatgtgaagacctagggcctggtaatttaagtatgattttacaaatgttgagggataattttgacttgctcagtaagctaacttttggacttacatgcattatatgccagaggctccctacagagagaaacttttggacgtaaacacactagttcaccctgtattgtaaggatgtttaaatatatatgctttgataaaccctatgtggtgcagttactttagaaataaagaatgtctagagccaaggtgtacagctttcccaacactttgtggaattggatctatgataaattagaatgtttgtggataaaagtcactggaagtaataaaaacttgagcagtgacaaccaatctgccattcatttaaatggctcacttcaatatgatttatttcccacaagccacaatttcactctagttacagcagctacacatgagcttgagatttgatgtatttttcagctctcagtggtagaaaagaatatctttgaaattgatcctttgtgtgataatacaagtggccactttgacttgatttatttcatagaattatttgtgtgtgaagactaaaattttgaaaacagcagctctttataactatgtaaacaattttatgtaaaggaaagcactcattccccaaacaacttctgggggtattctgagtttttaagcatatccccgttggactatattatacattttgtatcttgtccaaattcaaagcatcagctgacttgaaataactattaagagaatgtacccagaaacaaattcacaaaagtggggaacagaccagaggaattattatttatcttgaacccacgtcgttgaagcatgactcttcccataatgttatttgctggtaaagaaacaagaattccccaattccagctggaaaagggggtaatacacaaaactgttgatgtgtagttatttgcctgactcatcatttattcaaccaggcaaataaaggctcagttcctgcttaaagtgtgattgatgtccaagggctgtatttatcaagtacaatatttatgaagatgaatagtccaaagccatccccagtggaaatcctgtaaggtagacttaaatttacaagaataagtcaaaacaagcaacatgtgacttcttgtactaaagcccataaaaacagcagagttaaaacaaaccaaggctataaatgaaatgacataaaggaaaatatatgcaaatatttattatgtaaatacaacagaaggagagtgcaacaaatgttaatttccatcaaagaataattcatggcaaaccttaaaagcaaaaaggataaattttttttggaaaaatttccttttgtcatgaaaataaaataatacctcaaataatgtatgattaaaacttatcaggtcaagaacaaagaactagtaagaaataagactgtgtagactttgagagcccttctttcaactatcagtagatcaatttgctaaatattagacagattattttgatactgtaattaattgaagtaacagaaatatatgaaaaaaataatcctacagataaaaaatacacactcctttttattctttctatatctttgcaaaatttggttaataaaaataacaaaacatatgtacatgaaggagaaagaacaaataaaattcatataatatcaaaaagcaattgataatctacagaatataccaatgaagaataaagagaaaagaaaaactaaaattagacattagaaaaagaatataagagataaaaaagaaatgtaaaaacacaaaagattccatattcaggtcatatgtatgaaattctagttaaatggaccatttctgcagaaatataaattatcaaaatttaaatttaattaatttaaaataaaaatgaaattaaaattgtctacttaggtagattcattattatgaaaacttgcaaatcaattttccacctccaccaataataaggattttagggctagataattttactggtaatttttgtttctcaaattttaaggaaatagataaatattttgtgttatgtaaactatttgacaacattaaaagtgtgaaatatttttaacttattttgttagtctagcatagtcctatgaacaaaacctaccaagatagtaaatacttagtaaatacaaactgatcacatgaatacagtaagaaaacttaagggaaattttagcaaaccagattgaacattatattcaaagattaacccttccaggcatggtggctcatgcctgtaatacgagcactttgagaggccaagacaggtggatcactgaggtcaggagttcgagaccagcctgaccaacatggtgaaaccctgtctctactaaaaatacaaaaattagccaggcgtggtggcacatgcctgtaatcacagctactcgagaggctgagccaggacaatggcttgaactcaggagggagaggttgcagtgagctgagattgcgccattgcactccagcctgggcaaccagagaaattctgtctcaaacaaacaaacaaacaaaaaaaaaaaaaaaaaaaaaaaaaggattaacccttcataagctactttaggatatcccaggaaatgtacatacatcatatcaatagacctaataaaacaaaccacaatattctcgattgatactaagatgacattcaataaaaataatgaccaattactgacttttaaattcatactaaaataggaacacaaagatacttcttccacatcccaaaagtgtctttaaaggaaaaataccagaaatattgttatttaaatcatcaacaaggtgaggctacacacaaatatcatttggacatatttgggtcaatgcaataaagtatgaaacaaataaaaggtgactatgaaaataaggaaacaaacattatttgaggacaaaattatattagggctactcaaaacccaatagtatcaactctaaaattttttatattagggctactcaaaacccaatagtatcaactctaaatttttttttaattaatgacttcagtcaactgcttggatgccaggtaaattgcaaaaaataatagcttccttacagctagataggaggatattcatagctttcttacaactagttgtctatagcactgtaaggtgactataataataatttgttgtatgttttcaaatagctagaatacaggattctgaatgttcccaacacaaataaatgctttgaggtgacagatgcgctaattattctattttgattattatatatctcatacatatatctaaatattacactgtaatgcataaatatgtacaattaatatgtgtctacttaaaatatgtattaacatttttaagtaatagttttcctttgtatcaacaataaccaatgagaaaatataacaggacaaaacctccctgaaaagatagataaattcatgttaataatttgtacaagaagtgtgtgaggcctacataaaagcacctacaatactctctaaatttggccagagatagaaagagagatataatgacagacagagagggggaaagaaacatgaaatagtcaatatttctagatgaaataaagcaggcacacattacaagattttaatttttcccaggtttctccaaaactttaaaatactaccaatcagatctcagtttaaacaattctgagagtgcttagagtaagaaatcaagtagggataagaatagttaatagcactttgaaagacaagtaatgatgcctcgtcattaatttccagagaatattctgggggtattagctcagataggaaattagtagatcagattggtgtgacacacatatagtttcatcattccaaaatctgaaacagaatgtcagcgtttgaaacctatgcctttctcttatatactgttgatctttatctctgtctcagttacatcatctgcaaaattgagatgttgataatactttacttagaggtatttgtaaagtgccaaggacaacagaagttagctcttttgggtcattactactgccagcagtagtggtagtattatttctaaattgttccccaggaaagctgcagctatttatattcctatcagtactagtaaaggggtcctgcttccccatattcttttctgcacgagtttttccttcatttttttaaaatttttgccaacagatggctgagaagccatatctcattacccccaacctctcatttctcagattaatgagattgaaaatctctccatttgcttattaggaatttggatactgaggaaagattgggaattataactgactcttccaaatcaagaaaattgggagttgatactatctcttgtgaaatacaagtttacttctgcagagaagagcaagaaaaaactaccttttatttctagctagagaaattcacaacaaaacctagttgcctggattattgtataggatattaatttaaaagaaaatctagcatagagtaacattcaaaagttataaaacaaaatgcaaactgcttcaagacaactctcagctacataagattttttttttttgccaaagacaaagtaatgaaatttacatgtgcatatcagattttgcttttatttttaatagacatgcaacaattgtacatatttatggggtacaaactgatatttcaatacatgtattaatgtgcatgtatcagattgttacctccttcatgtgtcctttgaagagaattctttggagcacagcaggaaatctttcacttacacacaaattcccgatatatatactagttttctctcacagtacaggctccacctttcacagaggacaaattttatgtcacttttctgttaactttgtctattacatctttcagaattttttttttcatttttgagtaatcaaacaagtctaccttcttctttggctaagaattttcattagttttcttggattgagtgggatataaagctaggagaatttgaggagagacaggcagattttagaaccaatgttcgtaaaggttacagaagactattttgggatgttagagaagttatgactctgggagaaaaactttgaaagaaatacagatatttaaagaaaacttctggcagattttgctgtgaacttcatcttgtttcaccacaagccttcaataaaattacatcacttgacaattcttagaagagttgcctttggccgagcgtggtggctcagcctgtaattccagcactttgggaggctgaggccaaccagcctggccatcatggcaaaactccgtctctaccaaaaattaaaaattacctgggcgaggtggcacacacctgtattcccagctactcgggaggctgagacaggagaatcgcttgaacccgggaggcagaggttgcagtgagcggagattgaaccactgcattccagactgcaagacagagcaaaactctgtctcaaaaaaaaaaaaagaagaagaagagttagtttgagagggtgtgggttatctgtgttattaatatcttaggacatactggagttccactattggaattcatattgaaaaatataagataccaccaaagaattacactgtatatgtttatgtacatgtgagtatatttgtgtatataccagcatacaaaaatccaaatacagtaatatatggttttttttaaatctctgaaagttctaagagagtcagtagtaattcatttgatattgtttataattccttcagttcctccaaattttaaatatcttaacagatatttacctacagctgtgacttgaaaatttaaaaaaaatctcatctctgggaggctgacgctgatgttgactggtggaaagagctgcagtttataattttggcttattttgtttgacaaaggctgacaggattaaggttcatgagtacatcttgcaaaaggagcctgaagtcaaaaaaaggggaaatgcaataaattccataaataaacaaataaatcatatcaaatgaggagaaaaatggtatctgctgatgatagctttacctttactcatgctggcttaggtagttttttaatggctttattgagatgtgattcccataccatgcaatgtatccacttaaagtataagatgcagtggcttctaacatattcacagagctgtactttcattgcaatagttagttttagagtatctttgttatctcaaaaagaaagctcatatcccttaaccagaactttcgaaatccccaaccttcaccctcaggcagaggcaaccaccgatctactttctctatatacctatttgcatattctggacatttcatataaatggaaacataatatgtggtcatttgagatggaccccttttaaaaaataaactttatttattacacagttgctaaggttcatagtaaaattgaactgaaagtacagaaagtacccatgtgcccccatcctcccacacacacaccctcctcaactatcagcatcccataccagagtggcacattttttataatctatgaacctacattgacacatcattattaccccaagttaatagtttacattggagttcattcttcatcttgtgcattctattggtgcaagtgtataatggcatgtatccactgttgtagtatctcgcagaatagcttcaccgccctaaaaatcctctgtaccctgcctgttcatttcttccagccctcctaacttctggcaaccactaatctttttattgtctcaatagttttgccttttccagaatgtcatattgttggactcatatagtatatagccttttcaaatgggcctctttcacttagtaatatacttttaagttcctccatgtcttttcatggcttgatatctcagctcattttagtgctgaataatatcccagtatctggatgtatcaccgtttatttatccactcatctactaaaggatatattggttgcttccatgttttggcaattatgaataaagctgctatatacatctgtgtgcagttttttattggacataagttttcagttcattttggtaagtaccaaagagcatgattgctggatcttatggtaggagtatgtttaattttgtaagaaactgctggactgtcttgcagaatggctataacattttgcatccccaccagtgataaatgagagttcctgctactctacatcctcgccagaattttatgttgtcagtgtctggattttggccaatctaatagatatgtagtggtatctcgttttaatttgcaattccctagtgaaatatgatgttgaacatatttttgtattcttacttgccatctgcatatagtctttgatgaagtgttggttcaggtcttttgcccactttttcatcagggtgttcatttttgtattgggaagttttaagagatttttctatattttgtctaacagccctttgtcagatttgtcttttgcaaatatgttctccaagtctatggctcatcttctcattctgttaacatctttttttttttttttttttgagtcacccaggctggagtgcaatgtcacaatctcagctaactgcacctgctgcctcctgggttcaagcaattctcctgcctcagctccccaagtagctgggactacaactgtgtaccaccacacctggctaatttttgtatttttagtggagacggggtttcaccatgttggccagtctgatttcgaacttctgacctcaggtgatctgcccacctcggattcaccattgaacccatctggacctggtgctttctgtttgggaaaattattaatcattgattcaatgtatctattatatgtaagactatttgtgttatctacttatttttgtataacttttggcagattatatctttcaaggaattgatccatttcatctaggttctcaaatttgtagacatagcattgttcataatttttttattatcttttaatatacatagggtctgtaatgatgtttcctttttaatttctgatactagttatttgtgtcttctctttttttcttaagtagcctagctagagatgattgattttattgctcttttcaaagaatcagcttttgctgatttcctttgttgacttgcagttttcaagtttattcattttcactgttgattttttttattccttttatttggatctgatttgctctatttttccagttttctgaagcaaaaagcttagattattggttttggctccttctttttgcttttatatgcactcaatgacataaattttcctctaggcgtagctttgactatattctacaaattatgatgttgtatttctgtttttgtttagttcaaaatctttttttaatttaaaaccaccttttattgagataaaatcatataatatatacaaattttatttttgtttaagtattattttaggatcagtgggcacacatacaggtttgttaaaggtatattgcatgatgccaaggtttggagtatttgaatccatcacccaggtactgagcatagtacccaatagtcttcaattcttgtgcccccagtcctcctccctcttgtattctccagtgtttattgttcttatatgtatgttcatgtatacccagtgtttagctcccacttataactgagaacatttggtatttggttttctgttgctgttagttcacttaagatggtggtttccagctgcatccatgttgctgcaaaagccatgatttcattcttttttttttttcaattcaacatatatttattgaatatgtgctgaatttcaagcactgtgcccagttgaggatatagacatagacaagacataatcctgattctgaagagcttactattatcagaggaggctggcatacatgaaaaattgcatatgtccacaataaaagtgtgctctaaaggttgtgcactggagggagtggttagttctaaccatgagttctaaccatgaggctcagggacgtcttcatgaagttggatctgtctgaattttttgttgttgttgtttttgtttacttttttgaaaagctgcatttttttattttattgttattatactttaagttttagggcatgtgccatgttggtgtgctgcacccattaactcgtcatttagccttaggtatatctcctaatgctatccctcccacgtccccccaccccacaacagtccctggagtgtgatgttccccttcctgtgtccatgtgttctcattgttcaattcccacctatgagtgagaacatgcggtgcttggttttttgtccttgcgatagtttgctgagagtgatggtttccagcttcatccatgtccctacaaaggacatgagttcttcattttttatggctgcatagtattccatgatgtatatgtgccacattttcttaatccagtctatcgttgttggacatttgggttggttccaagtctttactattgtgaatagtgctgcaataaacacacgtgtgcatgtgtctttatagcagcatgatttatactcctttgggtatatacccagtaatgggatggctgggtcaaatggtatttctagttctagatccctgaggaatcgccacactgacttccacaatggttgaactaggttacagtcccaccaacagtgtcaaagtgttcctatttctccacatcgtctccagcacctgttctttcctgactttttaatgatcgccattctaactggtgtgagatggtatctcattgtggtattgatttgcatttctccgatggccagtgatggtgagcattttttcatgtgttttttggctgcataaatgtcttcttttgagaagtgtctgttcatctccttcacctgcttattgatggggttgtttgtttttttttttgtaaatttgtttgagttcattgtagattctggatattagccctttgtcagatgagtaggttgcgaaaattttttcccattttgtagggtgcctgttcactctgatggtagtttcttttgctgtgcagaagctctttagtttaattggatcccatttgtcaattttggcttttgttgccattgtttttggtgttttagacatgaagtccttgcccatgcctatgtcctgaatggtattgcctaggttctcttctagggtttttatggttttaggtctaacatgtaagtctttaatccatcttgaattaatttttgtataaggtgtaaggaagggatccagtttcagctttctacatattgctagccagttttcccagcaccatttattaaatagggaatcctttccccatttcttgtttttgtcaggtttgtcaaagatcagatggttgtagatatgcggcattatttctgagggctctgttctattccattgatctatatctctgttttggtaccagtagcatgctgttttggttactgtagccttgtagtatagtttgaagtcaggtagcgtgatgcctctggctttgttcttttgggttaggattgacttggcgacgccggctcttttttggttccatatgaactttaaagtagttttttccaattctgtgaagaaagtcgttggtagcttggtggggatggcattgaatctataaattaccttgggcagtatggccatttaaacgatattgattcttcctacccatgagcaaggaatgttcttccatttgtttgtattctcttttatttcattgagcagtggtttgtagttttctttgaagaggtccttcatatcccttgtaagttggattcctaggtattttatataaagacagcagtaacctctgaagacttaaatttccctgtctgacagctttgaagagactagtggttctcccagcatgcagctggaaatctgagaacgggcagattgcctcctcaagtgagtccttgacccccgagcagcctaactgggaggcaccccccagtaggggcagactgacacctcacatggccaggtactcctctgagacaaaacttccagaggaacgatcaggcagcagcatttgcagttcaccaagatccactgttctacagccaccgctgttctgcagccaccgctgctgatacccaggcaaacagggtctggagtggacctctagcaaactccaactccaacagacctgcagctgagggtcctgtccgttagaaggaaaactaacagaaaggacatccacaccaaaaacccctctgtacgtgaccatcatcaaagacgacaagtagataaaaccacaaagatggcaaaaaaacagagcagaaaaactggaaactctaaaaatcagagcgcctctcctcctccaaaggaacgcagctcctcaccagcaacggaacaaagctagatggagaatgactttgacgagctgagagaagaagacttcagacgatcaaactactctgagctacaggaggaaattcaaaccaatggcaaagaagttaaaaactgtgaaaaaaaaatagacaaatggataactgaataacaaacgcagagaagtccttaaaggagctgatggagctgaaagccaaggcttgagaactacgtgaagaatgcagaaacctcaggagctgatgcgatcaactggaagaaagggtatcagtgatggaagatgaaatgaatgaaatgaagcaagaagggaagtttagagaaaaaagaatagaaagaaacgaacaaagcctccaagaaatacgggactatgtgaaaataccaaatctacgtctgattggtgtacatgaaagtgacagggagaatggaaccaagttggaaaacactctgcaggatattatccagaagaacttccccaatctagcaaggcaagccaacattcagattcaggaaatacagagaacggcacaaagatactcctcgagaagagcaactccaagacacataattgtcagagtcaccaaagttgaaatgaaggaaaaaatgttaagggcagccagagagaaaggtcgggttacccacaaagggaagcccatcagactaacagctgatctctccacagaaactctacaagccagaagatagtgggggccaatattcaacattcttaaagaaaagaattttcaacccagaatttcatatccagccaaactaagcttcataagtgaaggagaaataaaatcctttacagacaagcaaatgctgagagattttgtcaccaccaggcctgccctaaaagagctcctgaaggaagcactaaacatggaaaggaacaactggtaccagccactgcaaaaacatgctaaaatgtaaagaccatcagggctaggaagaaactgcatcaactaacgagcaaaataaccagctaacatcataatgacaggaccaaatacacacataacaatattaactttaaatgtaaatgggctaaatgctccaattaaaagacacagactggcaagttggataaagagtcaagacccatcagtgtgctgtattcaggaaacccatctcacatgcagagacacacataggctcaaaataaagggatggaggaagatctaccaagcaaatggaaaacaaaaaaaaggcaggggttgcaatcctagtctctgataaaacagactttaaaccaacaaagatcaaaagagacaaagaaggccattacataatggtaaagggatcaattcaacaagaagagctaactatcctaaatatatatgcacccaatacaggagcacccagattcataaagcaagtcctgagtgacctacaaagagacttagactcccacacaataataatgggagactttttttttttttttgagatggagtctcactctgtcacccaggctggagtgcagtggtgcggtctcggctgattgcaagctctgcctcccaggttcacgccattctcctgcctcagcctcccgagtagctgggactacaggcacccgccaccacggccagctaatttttttttgtattttttgtagagacagggtttcaccgtgttagccagtatggtctcgatctcctgacctcgtgatctgcccacctcggcctcccaaagtgcaccatgatttcatctttttcatggttgcagagtatttcatggtatatatgtaccacattttctttacccagtctcccattaatgggcacctgggtggacttcatatctttgctattgtgaataatactgtggtgaacatatgggtgcatatgtgtttttggcagaatgctttattttcctctggttatgtacctagtaatgggattgctgggttaaatggagttcagcttttccttctttgggaaatctccaaaatgcttttcacaatgcctgtactaatttacattcccaccaacagtgtatacctgtttcctttactccacaaccttgccatcatctgttatttttttactttttaacaaaagccattcttactggtgtgagatggtatctcattgtggttttgatttgcatttctctggtgattagtgatgatgagcattttttcatatgttttttggccactcgtatatcttcttttgaaaagtgtctgttcatgtcatttgcccacttcctatcagggttatgtttttgattgttgatttaagttccttatagattctgaatcttagacatttattggatacttactttgcaagtattttctcccattctgtaagtttatgcccttgatcatttatcttgctgtgcagaagctctttagtttaattaggtcccacttgtcaatttttgattacgttgcaattgcctttgaggacatagtaataaattatttgccaaggccagtattaaaaagagtatttcctatgtttttatggggtatttccatataaaatattttcatagggtgtttcctaggatttttattgtttcatgtcttacatttaagtctttaatccgtcgtgacttaatttttgtgtatggtgatagggaagggtccagcttcattcttctgcatatgaataaccaattatcccagcaccacaagatctttttcaatttcacttgagattttttctttgatccatgtgttatttagaagagtgtaatttaatatccaagtatttgaggattttctagctactgttattgatttttagtttaattctattacggtctgagaggagacattgtacgaattttttatacatttacatttttaaggtatgttttctagcccagtatgtggtctttcttggtgaacattccatatgagcttgagaaaaatgtgtaacctgctgttgttactggaaaggaatcccaatccagaccccaagagagggttcttaattcttgtgcaagaaaagaatttagggtgagtccacagagtaaagagaaaacaagtttatcagggaagtaaagaaacaaagaatggctactccataggcagagcagcctcgagatctgctggataactatttttatggttgtttattgattatatgctaaacaagggatggattattcatgagatttccaggaaagggacagcaactcctcagaacttagggttcctcttccttttagaccacatatggtaacctctagatgttgccatggcatatgtgaactgtcatggcactggcaggagtgtcttttagcatgctaatgcattataattagggtataacaagcagcaaggatgaccaaaggtcacttttattggcatcttgattttgataggtttcagctggcttctttactacatttttgttttaccaatgggatctttgtgacccgtatcttgtgtcaacctcctgtctcaccctgtgaataagaatggctgacctcctgggaatgcagtacagaaggtctcagcctcattttactatggctgtgactcaaggtggagtcactctgattcaaacgcctctgacactgctgttggataaagtagtctatagatgtccattatatacaattgattgaaggtactgttgaggtcaactaagtctttacttgttttctgcctgttggatctgttcattcttgatagagaggtgttgaagtctccaaatatgatactggattcctctgtttctccttgaagttctatctgtatttgccttatgtattttgatgctctgttgttaggtaaatacacgtaaagaattgttacatcctcttggagtgtccctttattatgtaatgcccctcattagccctgacaactttccttaatctgaattctgctatatttgaaattaatatagctactcctgctgtcttttgattagtacaatcatagtatatatttcgctatcccttttaatctatgtgtgtcttcatatataacataggtttttgtagacaacatgtaattgggtctaggctttttgatacattctggcaatttctatcttttaattgatgcatttagattatagatattcaagtagtaattgagatatctgcattaatttctatcatatttcttacagttttctattttttaatcttgttctttgttccttttttgccttcctcacttgctgccatttgtggtttaattgagaattttatatgattgctttttttctcatttcatagcatgttgctatgtctaaatatttgtgtcttctcaaaatttgcatgttgaaatcctaactcccacagtagtggtcttagaaggtggagacttttagaagtgaatagggcattggggtaaagccctcatgaatggggttggagttgaaggaaattaaaatattttccccaacatatatttatttgacatattttgaaatgggtactgcttggccatctccacaaaactgctttgcaaagctgttgtagtaaatggggaaaatttggatctctagataatccccattaatgcagccatgcccctttccctttctatgtctttccccagatccaggagagattgagggtctgacacatttagaagtctgaaatgaaacatgtatcatctattctctctgagggaggcttcatgtacatacaaggccagctttgccatccagacacttctcccaccttccataacctgttttactaagccatcattctttccgtaacctcaaaatggtgtataaatttctgtgacccatttggaaattgggtcttcatacagaagactcccacgtatgcacagaaaataaatttgtatgtcttttctctattaatcaactgcctcatgtcagtgatttctaagcaagcatttagggagccaagagtctatggcttccacacctctctatggaaaaagtgttttttaaaattttcactttttacaaaattttttttttaatctttcattttctgtggtatgccaaggtgttttatttcttgggttttgtttgcttgttttagtttttgtgactttctgttttcttgggggcatatattctacttggtgttctctgtgctccctagatctgtgattttgtatctgacattattagagtgaaactcttagtcaccattgcttcaaaaattgcttttttccctttctccctttcttctctttctgatatttcccttatgtgtatgttatacccttggtagttgttccattgttcttgcatattctgttctgtttttttcagtctgtttttctctgttttgtaagattctatttttgtatcattgagctcagaaattttttctcaaccatgcccagtctattaataagccaatccaagtcgttccttatatctgttaaagtgttttcaatctctaacctttttttttttgtttttggttcttagaatgtctatctctctgcttgccttatccatcttttcttacatgtttgtttattttttcactaaaccccttaatacattaatcatagaattttaaaattcctggtctcataattccagcattcctgctatatcttactcttgttctgatgcttgttcagtctcttcaaactatgtatttttgccttttagtatgccttgtaattttttgttgaaaggcagatgtgatatactgggtaaaagggactgccacaaataagcctctagtaatgtaatggtaaggtgtgagggtgagggaaagaatgttgtagtcctatgagtaggtctcagtcgtctaatgaacttatgcccctagactgtgaacttcaccagtgcttctcagtctttgtcccttcttacgtggaacaggatggcttaaggggcctggagttggctatttttctcccctcctagactcttagaaaaccccagcagattaggctgtagctgctgagggcagagcattttttttttttttttttttttttttgagatggagtctcactctgtcacccaggctggagtgcagtggtgcaatctcagctcactgcaagctccgcctcccgggttcatgccattctcctgcctcagcctcccgagtagctgggactacaggcacccgccaccacgcctggctagttttttgtattttttttagtagagacatggtttcaccatgtttgccaggatggtctcgatctcctgacctcgtgatctgcccgcctcggcctcccaaagtgctgggattacaggcgtgagccaccacgtccggcctgaggtcagagctttttaagaacagaatgttctaatgtatctcaaaatggtctgttttccccccacaactaccagaaacatgaggggattttttttttccaatattcactgtgaggacccagtagaactctctgaggcaaaattaacacaagtgtgcagcaccccctatgattggctcttcgtggagtttttaactcacggaattgtccacactgaacttccagcaattactcaattatagttcatgttttcctgcccagcactggttcctggggatgtttttactccaagttgtgattatctgtatccacctgtctgtctgattaaggggaagccgtttgtcctatgacctcacttctctgccagatctaagaattagttgttgatttttcagtttgttcagctctttatttgttgttaggagagagtgacatcttctaagttccttacctgcccatcagaaaccaaaagtcaggttagctggcccattttttaattgggttacttgtctctttattgagatggaactgttcatgctgacttagatggtttgctctaatttcagaaagaaaatcattctactttgcaaggcatgacatttaattataacatttaactgatctgaacatgattaagaaagtgaataataaatggttcatttggggttattgaaaagtttagactcagagactcaggaattttaggtggattgggttttctaaattatttttatgtaaaacattctgattttataaaccttttttttcttatcctaactttaaaattttagatcatgcactttaccaggaaaatagtctatcgatagttacagctgatatcaaacctagtctttccttctttatctttttcaatatgactttgagatgaaaaattcacacttctgaagtatcaagagaattgccagactacataggtctgtgattgtaataaaaatagtgtgatctctttgggagcaactctcctgggagaggtataaatttattctctctgagccattgggagttctttctctggtttacacacaggctactgacacaaattgaagggtgtctagtccagagttttgctttaaataaataaataacctatcttggattcttggcacagtcagctcaaaagagcctgcaaggatgaatcttggcgaataaataccctaaactcactgtcctctctccctcagatcttgtaagaggatcccaagaaactggtagagtataagggaacctttctctttggtccatataggtcagctgcccaaggcggaggcagtatggcaggtgcaaaatggatctggaaggctgtggcagattgtgttttccaaagatggctgtagcaacatatcttatccaacatgctcttactgcagcatgactttaacactgctccctaccaagtagtaaaatctatccctctcctcctgaaatttagtatacttttgtgaatgtcttgaccaataaaaaacaataggagtgatgcagtatgattcctgaagctagtttctaaaaatgtatccacttctaccttgttccactagcacaattactcttggtatccagccactatagtattaagaaccctatgcagctgtggacaggtccttctcaataagaaccaaggtcccagcccactggtcctgctgaactcccaacagccaataccaacttgctggtcaaataaacaagcttgccagtttccaatcaagccccccacctagtgaagtgtccaatggagatgagtcctcgatgatgcctgttcaacttacacattactgaacagaaaaaaaaatgataattttctaatccactaaggtttggggtaatttgttatatagcaatagtaattgaaactcaaagtaaattgaaactcaaatggcatttggcataacatgatcaagtttctatgaaacaatggctctttattccttcatatcagtatgttttttttctcttatgtaacattcatatcattctacaagaggcagatctactctctatacttgcaatataaaggtaagacaaaaataatgagatttgatccacaagttaaactttactcaaagtaagctcttttgacttgaaatattttaattcaatgcaagaattgtcacatcaatcaagagtaatcctagaatgactgaggttgattagcagtaaatttatgtatgtatctatagcaatttatcaccatgttgaattatgtcaatgactgttgcttttaaaattatgatgagcacaccaaggcaatgtcatgtcaaggaaatgagccttgtgcttgacacatagtgtctgtttcacaaatactagttttcttgcccatctctcaaggtgaaaatagagtattgctttcggcttatgagttcagcagtatacagcctacacagcctacctagattattagagttaggagaaatcagagcaattatctgaagccttttataccttcaagaagagtaaagatgaggaatgcaatatcccaggaggtttaataatttttttaccctaactgctcattggaatcacctagagagtctcctctttctagtccattttaatttctaattgttctggatgtgacctaggtgtttctggtattttcttaaaaagatttcccaggtgaatttacagtacagccagcactgagaactaatgggtttagcaaactggatagcacagtgtttttcaaaacacagactctgtactcaacaggtagcattaaataatataatatagaatgagagagtcattctattttcaattttacttcaatcatttagattaaatcaaggagaatggccaaggcgggtggatcacttgaggtcaggagttcaagaccagcctggccaatatggtgaaaccccatctctactaaaaatacaaaaattagctgggcatggtggcacatgcctgtcatcccagctacccagaaagctgacgtggaaggatcacatgaacccaggagatggaggttgcagggtgctaagatcatgccacagcactccagcctgggtgacagagtgaaactccatctcaaaaataaataaataaataataaataataaataaataaatggctaaacatgatattaggcctgtcattagctattttctaatacgtgctaatctttaattaacagagcaaacgtctccggctcagggactttgacagtgtccagcttagtgagcatttaaattattttggacagtgtctatttatataattttctactcattatattaattttgctaggtaactattattttggtgagcagatttccatttaggataaaaatatacattttatatgtcaattcccacattaagttgaagaaagttaatcagtttaagaaaaattaagtaataatagaacatttggtaccaggatatggcaaaaacaattgtgaagacgtgactctaatgatttaagtgtagaaaacactgggttaagattgctgggacagcagactaggcatcctgagatcaccaattcttactccatcaaaatcaacacatcgcactggccagaaaaaaaaaaaattcccaagttgttaatatgaacttgatgttgaaattaaaaagcagatacctttgaggcaccgtggcacttgacacaacctaaaataggcatgaagtgccttcaaccaagtttttgtgatctttgatgtgtcactcttttaaaacacttatgatggaacaagctgggactcaaaatcctgtaatggagcaattattccagtttattggtacccaagaaagtcaagcaaattttgatattaactgattgcatcttacctgtcttaaatatcacctgttcagacaaccatgtgacagttgaaactggtaatcagtcagaaaaattaaaactgtttacaatgttagggcctgttttcatgtttcagtgactgccaattctttctgctttttggatgagcagcgtacattagtaatgaaggtgaacttgatgcagccatttggcattggtgggggcaaggtttaatctgtgtagtcaaaaatgcagaggtgggccgtgtcaccacctgttccttccgggagtcttacagaggaaaacgccaaccaggttccagaaggaacttacaggttcgactgttttcaaggcacctggagatgatttacatgtaatgtcagggtttggaaggcaacccagtgaaggaatgaatgattaatattggaagcactgcaataacaggctgtgtaaagtcataaaaaaagaggactgcttactcaacctcggttccaaatagccatcaaaatgtaattttttttcttaaactggaaaattatgcttcttttacattgagattgcttactagcgaattcattatttgcttataatttattatactgaaagtttgtacaatatttgcaaggttcaagaggttcccctaattccgaagtttattttaaaccttgattttagcatgtggtagatatcacaatgtattttcagcctacctgtaattagtgatgatctttctgcttgtttatttttatctggtatgggttatcaaatcaggtagtgttttctttctttagtgcagagtggtttttaaattacatcaaaaattccattagtgtcatcatctaagaaaatacaggggaaaagttaatcatatcctctcctatttcatttgatacacactggcttttcccttagcatttatttcaaggatgctttggcttacaaatccatttactgttaatacttgtaacatattatggaaatatgatttgttttttcctaagacaaacctgtgtgattagatggacaaataattgactaataaagtaatcctagctaagtttagtagatattgtaaaactacaaaaaagaaaaaatattactgtcattaagatgtaaatatgaacttgaagtcagctacagtgaactttttattttctggggacagattaactatttgtggattaactctacccctgacatccctatcccctgtccaccccattcagctctccttcttgagttactcaaataaaccgtgttcttacctaccttaggtctttgcacatgcctaagtaccctagtgtagtttatttttttacccacttttcctggacaacttctgctcatatgttaaatcttagctcaaatgagcagttcactgaaaccccaaaaagttctagattcccccaatgtactttgggtttacattacattataattttacattgatttgtgtagtcatttcattaatgcctgtcttccaactctatgccctatgaacataaggactgtttcttttttcttgccttcagcatcgtattcccagcaactaaagtagaatagttactttataaacagtttttaaatgaatgatcttatttttaataagtggtgctttgaaaaaggaactcaatttgtatgacttagaggatcatatcctacttcttacactcctacgtaagatactggaatagacttctctcacttccaaaaactcctttcctgagtaaattgtggacagcagcatagaaaaaaagatgtgctttctggaaaacagaattacactagtgggctttgaggggaagttttgagcaaaatagagatatgaggagaagaaaataaagctatgaatttgcaccttctcaattctggtcccttcctgcttgaggaggtggggaaaaaggaagtttaggaaaataatgcaaacaaagacaaactaatttaacagataagctattttttattcaaagtattattagtgtttctaagaatttgtccaaagatggttagtgttgtgttacttgaattattttatactctaaagaatggcaaatatgtttcttattatttctaaatattagatgcaagtttatttataaatatggtaaataatccatctaggactatttcatcccatttcaactaattttaccgagtttcttttttttttttttttggacatttctctctcacatcctttatcacatttaattcatgactaactatattctctaacaatgacaaattgatgggggaaagaattagtttgacataagtgaaacttccttttggagtttcttttaccttttttttcttaaatgcctgggaatactcaattgcatcttgataagaaatgttaagatatgctaataacattttaatttaattactattattaaatgtttaattcccatgaaagaagttggagtttggaattacagtcatgttacttgacttctcccatctatgaccctattgaaagctgagcatttaggggtatagttgtgcataatcataactgcattttggtaagcattgcattctaccaagaaatgaacaagtcataagaggatagcccaattcattttcacaaaatgagcacattcaagtgaccagcactgaaaacagaaacagaagatgacccgcatcctagatgtcctcatggtgcttcatcccaaaactaccatacctccaaaggtagccacaatccagccttctcatatgatcggtcatgatcaaatactcctttccatctggttcatatccttcacgcttttgaaactcaaccatgttgatctgtgtagttgcagttcattcatttttgtggcctaatagcattttgttaaatgattattccactacctgtttgtccattctactgttacagggttgtttctatttttagctattatggataataattataaacattcttgtaaaaaatgtcttttggtagacagctgcatgccattctgtagggcatatacttaggaatggaattgatgggtcataaattatatgtatgtcctgccttcgtagatgcttctaaacaattgtccagagtaattgtaccaatctacactcctttcagcaataagagttccagttccacatcttcagcagaacttggaagtgtctgtctctttcattttgccgtcgtctacacatggcatatgccatgtgattttatttaacctttgtggattacactttctaaatttgtaaacataacttgtttcacatgtttacaccaccttttaccctgacttgagtttacatcctagaaagcatgggccatgtgttaaacacttctgtgtccttgaatgaatctaacatagcaagcaatggatgcgcttttgttaagataaatcttgtctctatgtagtactcccttaaaagatcatagagtgggagagagatagcattagaagaggaataatacaaatatattttattaatggagacaaaaaataaggagaggatctctcttattctctgtcaaattgtgttctccttttatgtattcatacactcaattccatgttggggctgaaaaaaaatcatttccaattctacttgttttagttaattgcttcctttttctactgtgcagtgtaaaaggataattaaaaattatatttcccctgactacatttctttaggaagatggcttcattttttatgatgcagctatttgtcttcacctgtcagtgccaagagtgaacagaagtcaaaagtccaccaccaaacttttccttactccttcaagaaacaaagccagccattgtgcctaaaaggtgtatccagatatgtgaggacataaaatcctgacacagttctcttttacccagatgccttcaaaataagcaaataaaggttggcaagaataacaaccttaccccaatgccttagatggcatttaatagtaacagtttttcaccgaaaatgagagatttccatagaagtgataatcaacctcctatgaatatatgaagctcgtaagacctaagagtttctaaaggtcagcaagcattaaaggtttttgtcctggggatacatttctaaataaccctaggagaaggagagggagagagggaaagaaaaaagttttaacttgatgaaagtaaaacatgcaagcttaacagtttctggattatcatttaattacaactatcaatcatttcccatctgtcttcttccagttctcacaaatttcatgtaaaactatgcaatacaactaacagagaacatgcaacccattaagaatcctaaagatgggaagcaatatttaagaaattaccctatggaagattttaggaaattacctaaaaataggatagtagaattcatcttacaatatatactacaaaaattcaagactaaaacttttcttttaattaagataaacgctacttattgcttctttctctttaccagttctgacatgaactgatgatcattttccaagggctttggtttcgaaatcatatgacttattacaagtcatatttttactaatgtgtgaaactggcttgcagttagtcattttattaacacaattttacatgctcttaaaatgaggtccatttaacattgagcttttagaaatataattgctctgttaattagctcttgggaatgccagcaaatgtctttaaggacagctgttattattatttattttttggaggcggagacagagtcttgcctgtcagccaagctggagtgcagtggtgtgatcttgatctcggctcactgcaacctccacctcccaagttcaagtgattctcgtgccttggcctcccaaataggtgagattacaggggcacgccaccacacccagctaatttttgtatttttagtagagatggggtttcaccatattggccgggctggtctcaaactcctgacctcaaatgatctacccacctcagcctcccaaaatgctgggattacagacttgagccaccgtgcccggctagctgttatttttaaggtttaaaatgttttaatttcttcttattgaggggttcatgctttcatgcttactgtccctaacttctgcagccaaggaattaaacagctttaggctttttaagctccagtgtgttcagaaaagtgtttcaaccatggtaatccgcttgtcatgctgcatttatctcccactagatacccacatgtgtccctcttcttctcaggcagataattgcaaaggggttggaaccagagaaaagagttgagctggtgctgagcagtggatataaaaagaagtgtcaccctggtgcaagtaaatagactctgagactgtaatctctgcccttatttatttttgaaaccataaatgcccaggaggaagcttgttgtttatttggctacagaaatctttgactgcagtcatgtatggtttttaacttgtttatatttccatacattccattgtagcaatctactctcttataccaccttggtttgctccctaaatatagttttcattgcaatgttgttgtttttggccatagacttcaaacttctttgtgttttttaaaaaaataacagtgtattcattacctgttttcccaacagagttcatctggtgatttaatgatcagaaacattcagctgaaacacagtgggaaatatgtttgtatggtgcaaacgggggtggacagtgtttcatctgctgctgacctcatagtaagaggtaaaacatttatgcccccttgagtttgtcacttcacatcttaacagcattccttactggaggaaaaaccatgatgagatagtatgtgagcatacgagttataatattgatttcatcccccctcatagaccacagaatatgacaataggggtgagtgctaattcaaagaaataaaaatctcaactctgcccttcaaatagctctcactgtaattggcattccacagctgctgccaagctgatgtgttcttgagcatgtcattaattcagtgattgtatttaatttgagagagaatattgtgcagtgtgtttgcttccaaaataatcaggatttgggaataattgtatgcaggacatttttctaaaaatacaaaaaaagtatcaggattattcagaatgactgagaaaatttgccaacctgagctgctgcccaggatactgatttgctactgggctgaaaaatgaccagagtgtgtcataaaataaaacacatctagatatcagattgggaactacagagatacaccagtggattaaagggaaaggcatcacaccaggagcagaggacattgaatttagaaaggtacaggaatcctgctgaacagaggcttttaaaagtgaatatcatctgcaatcagagagtattatggtttgggaattactgcctcacatccaaatttaagatctaacaacagaaatgcggggagggagagtagagggaagtagttgttctattaccaggtaaatggccttttccctaagtgcttctgaaattgggaaaagtcagagatattgaagtggtcatgtgacattctcttctctttgataggagaggatgacatttatggaactgctactcaatgtttccatttgtgccttccttaggttcacctggaccaccagaaaatgtgaaggtagatgaaattacagacacaacagcccaactctcttggaaagaaggtaaagacaaccatagcccagttatatcctattctatccaggctcggacacctttctccgtgggttggcaaaccgtcacaacaggtaaagcaggagaggcagatgtcatctgcacacatataaatggatttcaagtcaatgctaaagcaggcagactcttacctctgaaatattcctttgtagtgcctgaggtcatcgatgggaagacgcacacagccactgtagttgagttaaacccatgggtggaatatgaatttcgggttgtagccagtaacaaaattggaggtggagaaccaagtttaccctcagaaaaagtaagaactgaagaggcaggttagtgtttttttttctgagtaatggattaatagatttctgtgtacttccatttcccttggccctgaactccaggccagcagggggtcagcctcaataatccattgttgcagttatctaacctttctaatggcagaactggccatatggcatttgtcaaaagaaacacatgtaagtgactctgatgtagtatgacatttccaagagttcagtccattgtaaatgatcattagtgcatgtgagtgaatatgcttttgtcacttaaggttataattactgtctgacatagttaccctgttaacaagggaagtgctgttttcatttataacaagcattggcaaattggtaggataatgacatttgggagttctgctgctaggaaatctcattttgccaccaagcttagtgaaggagcttaagcaattgatgaataggtatattttgtcacttcaagtgttgaattaagaaaaaatcattgataggaatttccatgtgagacaactattcacatagaccataagactgcttttattattctagaaatatcctagcattaaaactcaaactagaaagtgtacatagcatcacattatagggacaattgagacctaaagattgccttttcagaatctgtaatattatttaatattaactaaaatgaagtttgaaatagagctggtgtatcactttaggaactcagctaagatggaagtcatcaaatatgtttcagtaattttcatgatgctgtttcactcagaacaatgcacataatgtttatgctaggaaatatgagaaatagaggaactgtgcttgccctggtgttctggtcatttgttcacacaacacatattttagggagcatcctctctgtgctcagcactttctagacattgcaagtacagctgtgaccataccaaagacccaccttcatgggacttctattctagctgtgtcatggggttcactaagcctagagttctcagtgtgagaatctgatgcccctgtgaagtttataaataatacctcaaaacaagattcgagggtttgagtctgggtcatccttacatatagccaatgttgttctcagaattatattctacttggaatagtcacaagctaaacattcatgctggattgatttcccatcatctccagtgaatcactttttcttgttttaagtctcatactagcaaagtatcttccaacttggtcatgtttttattactgtttgagagattttgaatttttttatgatttcatgtaaatatgttgtttgatgatctcataaaaatatataaatgcatataatatataagtatatgtacataaacacccatatgtatgaatcatgtgccaatgatgaaattattttaaatattaaaaaaacattgcattatcttttagataaatattactaaatgcaagtaccatttcatctctgtttctctgacctgtatagttccagaagtgcctccttctgaagtcaatggaggaggcggaagccggtctgaacttgtgataacctgggatgtaagtgtttgggcagcatcttccccatcagggtcttgctgttcccatgatcattatggcttcccaggtggtggtgccaatggtgcaggtggtggtggtagtgctgggggtgtggctggtgggtgctgctgctgctggtggtaatataggtggtgatggtgggattagtggtagtggggctggtggtggtggttgtagccctagtagctaatattttttgatactttctctgagccatccactattcccagcatttagcatgtattttcctcatgtcatccttgcaacaatttacagatgaaaatactcaggctcagatataagaaataatttgctcagggtcacctggttggtagacatagagatgagttatgttgcggctgttgcccctcaagctccccttatgactttccaagcagctgtgcagcccccactggtgaagtcacctattccaacaggtgcttgagtttgtttctttcctggccattctcccagccattggtttacatcatcagtaggaaaaaggttaataggtttgaagtcaaaaagtactagaattacctgcattttttgaagatgctgatgatgtgtcaacaaaatttttgacacgactcaagtatagctttgagtttaattcgttaatatttttttcctttttttttgagacagtcttgctctgttgcccagtctggagtgcagtggtgcaatcttggctcactgcaacctccacctcctgggttcaagtgattctcccacctcaacctccccaaatagctagaattacaggcatgcgccaccatgcgtgggtaatttttgtatttttagtagagacggagttttgctatgttggccaggctgctctcaaactcctaacctcaaatgatcgaggtgccttggcctcccaaagtgctagagttacagggatgtaattcattaatttataaattagtatttacttccctttttttttttttttttccttgatggagtctctctctgtcacccaggagtggcgtgatatcggctcattgcaatctccacctcacagattcaagcaattctcctgcctcagcctcccgagtagctgggactacaggcgcatgccaccacgcccggctaatttttgtatttttagtagagacaaggtttcaccatattggacagactggtctcaaactcctgacctcgtgatggccacttgccttggcctcccaaagtgctgggattacaggcgtgagccaccgtaccaggcctttttttttttttccagttttacttaattgttcttaatcaccattttaatatttcttctcataaagtcaacattaagaattagataatttttatttggcttaagagatcagatattttcaactgaaagtatatcttcctattagaaactcagacttgagccataagatgatcagctaactgaataatcacagaaaattccagttcattatctggatggctatgaaatggtgacatatgtctgtttaaaagcagctgacatgactctcctgctgatgtttttctccttttttcatgcaactgcttaatacaatgtagatgattatttgatgacttttacaaataaatgcctgtggattacagctgcattcatttttgccttgcccttatgtgtaagggtgattcagtatgtctttcctttatagccagtccctgaagaactacagaatggtgaaggttttgggtatgttgttgctttccgccctcttggggttaccacctggatccagacagtggtgacatcccctgacaccccaagatatgtctttaggaatgaaagcatcgtgccatattcaccatatgaagttaaagtgggtgtttataataacaaaggtgaaggaccatttagcccagtgacaacagtgttctctgcagaagaaggtatggaaaacatgactgtatatcagttccgcctaataataattatttgtgctccaaaaactgatttggagtctcgttttgacttcaaatatatttattccaaagaacaatcatccaggtagtagttagattcccagtgcaagtcataaagatcaatcataaatgacttgaagtataagacttaatggatagttagaggatgtaaccgtgaaaggaaaataaaacctcaggaccccaattcactaggccaaaaggaagaaattaagctgaaagccaagtcatgcaagaaaatgcctttccttttgttcctaaccagatagctacagataaaaggttaaatctctctacaggtagctactccatgttcgccttgccttatgtaaagtgctgatttactgagcaggagacctaattgattagcctcctatctgctccttttcccttgcaacatgcggattaccatacccttcctctttccactccagcccactctaaatattaaagccctcagattcacctttggaaatggacacagaccatgtttctgtacacccgtgttttgttttttttttcttctgggcatgtccttaacaccttgataaaataaatcccaaaattgattgagacctgtctcagatcataaccatcaatttaaaaatctgtttatgaggaacacttcctacgttccagcttgtgaagcaaggaaaatcacagccttaccttggggtaataaaaatataccccttggagctaccctagtcctaagttgtatagtggttcccatggcctgagaaaaggatgttactggatgaagagtcaggagcagcggtatctcattcaacagacatgcaatgtgcaggtttgagggatatgaacctgctggtggagatacagacatacttcactctggacccgttctgtttctttgcctttcttttatacctgtctcagatattgagacatctacattttgtctcatgaccgctttagaaaataatcaaggtaaaagaattatgcaaaattgccatttcatagatcagcaacaactgttggctatctcatgtagttctacaaaaaaaaaaaaaaatggcagaaactaacatgtattgaagttttactacttgcccgacattacctaatttgatatttcaaataaaaaatataggcactattatttcccatttacaaatgagaaaatggaagccttgtgaaagagagtaataaatttgccaaaattcctaatagtaagtggtacagccagtattttaaccaagggcctttgcccttaaccattctgagctcacgaaatatatcagtgtctcccctaccctccagacctgacagtaagttgcaaaaagtggcctgcagttgtcattcctaagaatagtaagtagagttgatttttcttcggctccccgcccctattcttgtgttctcacttttggttgagttctgagagggattttttttttaagggttatacaagtctttgcagaagagtcttaaattcatagccagacctcatttctaaaagctgccagggattgcaagggcaagtcaggggtctggggagtgatggccattatccagggagttttcggacactgtttacctgtgcatccaggacctaggtgctggcaactggaaaagaggggcagccacagcctcttacgcattgttgcctccctcatttttcttctcctcttatcatttttgctcctgctgcagagttagctaaaagtctttctgttcaaacatgaaaaatgaatcgggcttacctaagaaagaagcaaaagacttctgtgaaatctactagggtgtctctgtgaatccaagggagagttatgcagcaaacctcacaaagatcttcaatcagagaagccctggaacctcagaaaatggttctgctcttctagagcacctgcactggatcagtgggctccaagtactcctcgactctccaaaccaagtttcaaattctcaggagagaaaatctaaggggcccagccttagaccaggaattcgtcttagcatcaagcaagatccttgtctgagaagcaggatcatttgacagagaaatgcacctgagggaggggagattcctgctcagagctgggccctgagaagggagaaccactgtgaaccccatagaatctcaacagtgctttttacaaaggggaatcttcttgctatatgataagccacctgcatttctatctactccttcaaaagagcatgccatccaccacatttcagttgtctctgtaggcctctctagacagggtactcactcagtgtttattgtgtaaatgagctttacttaacctagacctttgtttggcaaaatgaaaactaagtagcgtctgtgggcagagaagttcccaagcagtaggaatgagatgaagggaaggaaataaggacaaggtgaggagaagacaggcaaagaaaaaggaagataaggaagatgccaagaaagaggtgcaagggaggaaagtataggttgccacagctgtttagcaaagaaaagcctttggctatgatgccatcttttcctaagaaacggaaatggaccagtgtctctattttcaacatatggtgccagaatatttcatacaattttcaaatacgttaaaatgcttttataaaaataagaacattaatctgtgttttaaactaactgccaaaattatcatcatatttcaatttctgtttccgaacagagcctacagtggccccatctcaagtctctgcaaatagcctatcttcctcagaaattgaggtttcatggaacaccattccttggaagttgagcaatggacatttactgggctatgaggtaatttcttttccgattaaattgtgtatgtgtgttaccgtgccactttgtctccttgaatttaaaacccttaacaatgacctcttatttgaagtctgtctttggccgaaatttttttatcaacacattgtttcatctgatgttccatgtatactgaatttaaccagttgaatgaaaataacattagttggagtagaaaaggaataaaaaaagaatatgaaaggaaatcacgtatcacgtgggccaaatattttagatgagttgactaaaaaataagggtgagattgaactgcagtatcaagttcatagagtactttcatcaacaggaagtcactgtcctccagctctttgtcttactttcttggtggctttgttacattgtggggttcttttataggctctagagaagccagctgtctgtaagatattttgagccttcaaagacctctctgtttagtgaaataggacgaaacatctgaaacagaggataatgtaagaccaaatataatgaaggtctgactaggtcacccaaaacaggaaatgtttgtgttgtcaagaaggatgggacatactgaaagtcttcataagggtagtaaggcttaacaggactttcaaggcaaagtaagtaaaggtggaaggagtggaaaacattctggattaggcaaggcatgatagaaaagcagaggagtagaggcccacctgccaaaggttcctgtttggaaaggtgacttcaaataggcatgggaggaccaggtcacaggtggctttaaaggctaagaagaaccatttgaactgggtcccctatttagtagtgagcagttagaggaaactgggagtagtagagctgagaactggcaagataaatacaattcaaagattttgccagcaatgacattgtgggattcatagttgtgatttcatcctacccacagctgtcttcttatgaagcttccctccaagcttccctgaggaagcatgtaactcctgattcagtggcaggcttacacaggcaggtttgcatcacagggccacatacccctccacttgccaacacaccttcaaatgagggttccagggtggtctcttgatcaaatgtaaatgctctgtggactgtgaagcctagcaagtcagattcttgtttgagatatttatataagaaattatagagattatagttagtgagtgtaatgcagtagtgtgtcaaatttagggctcagttcagacttctcaaactaaggccatggacaggcaggacaaagctaatctgcagagatgagatacactgtcatgcatccctaaagaatggaggagacaagggcccatggaacctgcaagagggcagaataagccaggtgtggtggcttgcgcctgtaatcccaatactttgggaggcaaatgcaggaggattgcttgagcccaggatttcacgactggcctgggcaacttagtgagaccccatctcaacaaaatatacaaaaattagccaggcatggtgacacatgcctgtagtcctagttacttgggaggctgagatgggagaattgcttgagcccaggaggtcgaggcttcagtgagccgtcatcctgccattgcactgtagcctggatgacagactgagattctatctcaaaaaaagtgggggcagccagaataaagtagctctttgacagtcattcagttatcatatgacttggctttattctttttcataatgtaaccttgcccttctttttaatagattctccttatatttgaactgccttgaaagagtttctgttccttgcaaccaaacaagcatcgacttgaattaatattaaaaaattaagaaaagaaaggatagggaatagagcaatgatgctcaaagtatgggctgtgaaccccctacagcagaattacctgaaggtgttgttaaaattgagctcccacagctctcccaggacccactcaatccaaacatttaggactaggtcttgttagtgtatatttttagtaactatctgtaaggaaacatcttcctgcacagttaaacataataaacactggtcttgacagagaagcctgatcagagacagaatagtctggacttaaggaagagagagtatgaagaagtaaaacaccacataaatacaggagaacaacttaatgcacatcttttaaaggaagccaggaacagctggatggaagattcctttaattccatgacaatagatgaaagcaatgaaagatgatggggagccaacagtagctcccttgtggttaaagaactggcagtggcattggcaatggaggtaaagatataggggctggaaggagcacagctgtaagggattgtggctctgaggccagtcccatagcaaatcccaattctaccacttgccagctgtgtttggaaaattacataaactctgtgatcctcgttttcctcacctgtagaatggggacaataataggcctaacctcattaggatattgggaggattggataagattaggtatgtaatgagattctcataatttctggctctttatttatttatctatctatttatttttgagacggagttttcgctcttgttgcccaggctggagtgcagtggcatgatctcagctcaccacaacctccccctcctgggttcaagcaactctcctgcctcagcctctctagtagctgggattacaggtgcacgccaccacgcccagctaacttttgtattttttagtagagatggggtttctccatgttggtcaggctagtctctaactctcaacctcaggtgatctgcctgccttggcctcccaaagtgctgggattacaggcgtaagccactgcacctggccagtttctggctcatcataataaacagtcagtaggtgtgagacatccctcagaagaatttttgagatattaatgtatctatttctctccagtaaatattctgtagcaaataattgacagtaatctcccttaactcaagggattatgccaaaagctatcaaaaggagttgcctgcaagacacttcccttcctagctttgtttcaaaacttcaggccattaggcagattgttccgtgtttcttggagggtcacaggaggaaaattgcaactgaggaaaacatagaagagaaatttccaatgacattggcagacataaatgtctgaagcttacaaagcctcctgggggctacatctttctaaagcagtgcccaggttgacggcaagattgaacaactgtgtttcccacactcggcagtgatttctcactcaccaaacatggcccccagctgctagaattaaagggctcaaatcaaacacaaaagtaagtgatcttgggggctttgggaagggagccacaggaatgactgtggctgaatctcccattagctgagcaggatatggaattcaatgtttgatcaaatttatttaaagaaaataaatgaacactgctgggcgcggtggctcacacctgtaatcccagcactttgggaggccgaggcaagcagatcatgaggtcaggagatcgagaccatcctggctaacacagtgaaaccctgtctctacaaatatacaaaaaatttttagtagagaggaacacttttacactgttggtgggactgtaaactagttcaaccattgtggaagacagtgtggcaattcctcaaggatctagaactagaaataccatttgacccagcaatcccattactgggtatatacccaaaggattacaagttatgctgctataaagacacatgcacatgtatgtttattgtggcactattcacaatagcaaagacttggaaccaacccaaatgtccatcaatgatagactggattaagaaaatgtggcacatatacaccatggaatactatgcagccataaaaaaggatgagttcatgtcctttgtagggacatggatgaagctggaaaccatcattctcagcaaacatattgcaaggacagaaaatcaaacaccacatgttctcactcacaggtgggaactgaacgacgagaacacttggacacagggtggggaacatcacacactggggcctgtcatgaggtgggggaaggggggagggatagcatttggagatatacctaatgtaaatgatgagttaatgggtgcagcacaccaacatggcacatgtatacatatgtaacaaacctgcacattgttcacatgtaccctcgaacttaaagtataaaaaaaataaaaaagtaaaaaagtaaaaataaataaataaataaaaatacaaaaaattagccgggcgtagtggcaggtgcctgtagtcccatctactcaggaggctgaggcaggagaatggcatgaaccagggaggcagagcttgcagtgagccgagatcacgccactgcactccagcctgggcaacacagcgagactccgtctcaaaaaagaaaaaaagaaaataaatgaacacatatggcagtcctcagatgagagactgacatgcacactcaccatgaacaatgttgtcctttacagaaatcatgacaggatcataattcttgacctagtcgtaacttgtaaaatagttaagaaaaataaatggaagaatatacatgaatggcttgtgggattccaaaccgaacagagtgctagcagtcactggtggttgttgaacagcttaaggcaggtagatgttgattttttaatatagtcatgcactacataatgatatttcagtttaggacagatgacacatacaacagtggtcccctaagattacaataccacaattttactttaccttttctatgtttatgtatgtttgaatatacaaaaatgtacaattgtgttacacttgcctacagtattcagtacagtaacatgctgtacaggtttatagcctaggagcactacgctacaccatctaacataggtgtgtagtaagttataccatgcaggttcgcataattgcactctacgatgttcacacaatgcaacaaccatctaatgatacatttctcagaatgtatccctgtcatcgtaacacataactgtatataaatttaggtcaataagaagtcatccagataaggatattttataagaaaggagaattacaccattattggtcacaccaagaaagagagtttcactgaaagacagaaaatttaaaaatcctcatagaaccgtcacagtgtctagttaagtccacaccattttagaattagacaaacctgtgttcagatctgctagtttgaatacaaactctacaaggagaaggtaactcagcctttttcctcattgatctatcccaagtgcctggagtagtatctgacatacaggaggcatgcaaaaaatatatgttgattgaataactgcagtttgggctctgctaccctgttgctgtatggccttgagcaagttgttcgagctctccaaggctcagttaaaatagagataataataactcacagcattgtttgcaaattaaatgagataaagcagctattgtcaaaatggccgaaagagacttagggctgtcacttttctctgttttgaatattgggctttgggatgagattgtactgaagaaaaaaaaagcaaaccagtgaagtaatatatagtgatgtagcacaatcccagtgtgggacccagtggccaccatttctaatgcatgctgatattgccatcaaagtggggcacagaaagatgagaagagctatgggaaaatgggactttcttgaaattaattacaggttgaaatgcattgccgcttgcctgtttgtgtaaagagtagcaaatagaatgtccaaatgtagcatgaatacagtattgaaaggaaacaacgattaaacatttcttccccaaatgcttggtaagtataaagaaaaaggaaacaagctgaaagaagtactaattgggaaaatcttacaaaataatttatgtaattacaccaagataaaaatatgtcttttcttagtttcagtaatgatttaaaaattaaccttggttgggggagaaggacttggcagagtatttaattatcagtcgtgtggctaacttttctgggttgcagtttccccagtttggctttaaaattgttaatagctccttcctttctctcatctcagtgagggttgatcatgtgccatgtggcatgctgagcacacatcatcattagcatctagactaattttctttctgatttgaccaagcagtagttgagaagctcatttccctgggctccaatttatttcatcagctaagccgttacactcaggctcagatcttttctggtgcccttttgggttggaacaagagatacagacatgatgaagagaggcagaaggctttaagttcatggatcctgggtgcctgaggaatgaaagctcccacgttctagtgcagtatctacagtccatttttttaaagtccttctctgttttgaaagaaccaaatttgggagaatgaccttgataaatgattaaaacaagtctacgcttgtgaaatgatacagattagcatattttggaggaatcagtcttttttttaagtttggcagaagaatgtaattaatgtgccataatagaatgccaaacttaaacttcattgatgccttcttccagcctcctgttccaaacagctgtacggaatgtgttcctgatatttgaattagaatgaaaaaagatgtaggccaggcgtggtggctcacacctgtaatcccagcactttgggaggccgaggagggtggatcaccttaggtcaggagttcgagtccaggatggccaacatggtgagaccctgtctctactaaaaatacaaaaattagccaggcatagtggcaggcacctataatccctgctactcagaaggttgaggcaggagaattgcttgaacccaggaggtggagattgcagtgagccaagatcgtgccactatattccagcctgggcaacacagtgagactctgtctcaaaaaaaaaaaaaaaaagaaaagaaaagaaaagaaaaaagatgtcaaatatgtgagtactttttttgagactatgaaaatgtcactggaaaaaaaagacttatgcattaggtctaattccctgcaatcgggcaaagaattcactgtagcacaagttgaatgcacatgggaaaataagatacagacaattgaggcatactgaaataaatatgacaggcaaaaatgcattcaagtgagtataatgcagacttttgaagagggtcaaagggttggttttactggagagagccatagcagtagccttttgtgagtgagggttgcctaaatggtgctgtattctttattaggcaaagatattccataccaaatggtggctcagcattggggaatgcagggtaataaatatcccagcctctctttccttccaccctcccatcaccagcatcctattacctacacccagcgagaagccacagggcaaaggagccagactgacaatagttcataccagtcagctctcctagggactgagagcagagtgaagaagagtggaagacagatctggagttgtcttcctaaaagacctttaatgcatttttacctgctttttatttatttaaatgtgtctggtctaactgctaagttaaaatatttgtctttgaaaatctattagtatgaacataattctttttgtctattaaaagagtatttctgatataatacctattctttaatggctgaacaatgccattttaatagattatttttataagctgcatttcatttttaaatttaaattaagtgaaatctctgctgcagtggtattaaggactcttcacaataggaacattctttatggaaaaatcaaattactggaactaatagggatatttttaattctgatatttctcaactgtgtttctgtttacttacccaaataaaaatatattggtttgtgaaatggttttatgattctgaaggaaaaaattgtattgcctcatcaagaaattggagttttgatgtctcatggatgaatacagtattgagacttgaatacgaagcctggcgaatctctgccataggaaggagggaggcatttttaaactatgttcaggtcattcaacaattcaacagcagttaatggttagtatgtacaggctttgctgcgaacagttaaagatatggtgataaccaagacagacaagcccctgcctcaggtgtgtgaatccaccttaacatcctttccctcctgctgtctgctgggtgaggaaatgcagttaattcctgtcccaggtgcacatcctcactggcaaaccaaggcatagtcactcacgactgctcaagaagatagcctgtatctctcaggtgtctggcaatgaaaaatgattgagaaccacaattcagtcttaacaaccctctcccctggagtggatttgccttttatttttcctactctaaactcagagtgaatttgcaataggaaaattgctgcgtttcttcagttctggaaaattatcagcctttttccctttgaatattggtttttcctcagtctctccttctggaactccagttagaacttttcattctaccctcagtgtcccttaactttgcttttgtaatgtttatttctctatacaggctctgttctgggttaattagttcccttttccaccataagtcttcagcttaattctatcattgattttatttttttaataattgtaattttttaggtctataagccctgcatattatttttcaaatctgattttttttaaatcttctgtcattgcatagtagattcagtttcttctttagtaaatctagacatgttaaacagttattttaaaatttgtttcagatcagcgtattccagctcatcttccactggttgggtctgctgacattttcttgctagcagggttcctcgtatgctttgtaatacttgtctctctgcttatcttctgtagatgctaccttcatgttctgtcaaccttacgttcactcttttctgaacaattacatttccaaatttggttccttcagactagacactttttcttctccatccctgtactgtagttgtgcctatcaaatccaaattagcatagagatagtctgttctttcagttgtagtactttgactatttaaatccaaaacacaactaagaaagaaaatgatgtcatcttttttatttctttcttgacttttccacatttttaaaaaatgatctggccttatgtaaacatttttgagcaaaattgtatagaacacagcaatacttacagaaaattggcaatattaatggtaacactttgttcctatttttaattttatatatatatatatatatatatatatatatatatatatatatatatatctccccttcattctcccacttataatctcatagtctggcttgctcagcatttgttctgtttgaatttatctggttcatatatttatttgttcattatttttctcctcctagagtcccttttctctatcttcactgctgtgacacacagcctaatgcagcacctagcacatagtaggtcttcagtaaatattggttgaacaaatcaggaaataagtcagtgcccattttaatgaaaatcacttaatggaaagggcagaattttttaagccttcacatgtttggtgtcttccgcccaccaggtgcggtactggaatgggggtggaaaggaggaatcatccagtaagatgaaagtggcaggaaatgagacatcagccagactacggggcctgaagagcaacctggcctattacacggctgtccgggcttacaacagtgccggcgctgggccttttagcgccacagttaatgtaaccaccaagaaaacgcgtaagtatattctgatttctttgaatggtacggaaaatagtttgcattaaaaaggatagccttctctattatttgaaatggacaacccaagtcattaatctcactagattatataaacctaactccaaaacctaactccaaaacccaactccaaaacccttgtcctcatgatatccctaaatctttaggtagagtgtgaaaatgaacgtgcaccttctgaaaaaatcttagtgtggggtgttaggttaaatctatccccttttcttttaaaatatgataagcttagttgggtttactttcatgtatttttagtttcccaaagcttgaggatttctgataagcatgaataagttaaaattaatgccgaagaatcaggagtgatttttccttctttatctttctttcctccatcatacaaaaaatggcaatgtgcattaaatggttatcagcaaaagatgatggtcctgtgaatgtgttgatactttaaaaaatctaaccagagttgtcagtgttgctttcaaagctgagtttttgttagctgtgtattcacaggtaaattcgccagctgcaatcatgagttacaattatattagtctacaagaaagtcagtgatttacaatttgctaatgttccacacatatttcagttaatctaatagcatagtatacatttaatcattgtgttttattgttttattggtacttacaatgcaaatgtttaagttactattgtcattgccctcatcttagctaatagtgattgaaaacattctgtatcccaagtaatttatgctcattcccacatttaatcctcataactactcccaagaggtaggtgccattattatctctattttaaaggtgatagaagtatggcttgaaaggattaggtaacttacgcgcagtgataccatacttttacttgcagaaaattgttttcttaatttatttttcaaatttcttaatttaataaaaatgtttgcttaactaactttatgtaagaatgagacaatttttatgcttggttgctaatttcattgacgcatttctgtttccatatcatttccaatttttttgaaaacatacttttttgtctaaaattgcaaagaacttcaataatataaagttgaatatgattggctagcattttttatggttaacttaaagtaatgtaagacagttctgctactttagatgttaattagcacgtgtaaatttgattaaagaagtttgtgtgtttatctttgtattaggtatagaaaaaagagtgtggctaacaattggctagtacaatgagcattgcagagcacaaatttagcaagaaaccatttgaatttctatagcaagacccatttgtaagcaaccgactaatgtaacaatttaacatgatccttatctaattattataggaagtctaatctacctgtttttcataccacttggttgctgttagaccaaagagcacatgggtttggaaatacagatacaaaaaaactctgtatttacaactctttactaaatatgtttggttttctcaacaattcttactgaatcaatatggtctaaatatacatcattatttatatattccaaacacagcatcaatcaaagattctgattgcaaaaatatatgcaaacaaatttgtctggctcttttctctgacttaataattgatgtgattacttgctaggaaattatgatagtaaaagacagtgtaacatcatggtggaatcagtgaagaacttagtggattagtaagacagaaggaagagactgattagaaatcaatagaaatgtcatgataatgtacaatgaatgaatgaaaattttaaaaagaagccaaatccctttacaatttagggatagcatataaacgcccaatccgaagtagaaatttgcacaaaacagtgatgctgataattatggttgacacttactgagcaatttccggtcatggttctaagtaattttcatgtattgattcttaattcccacagcaatgtcatgacttgaaggtattagcatgcttactttagagaggaggaagctgaggcatatggaggttatataatggtactgacattgcagagtaagtaacaggatgggcatccaaatccatagtcttaaccactatggtatcctctctttcagccatattgttagaatttcatcactcatttaatacctttatttattgtgattttgctctgtgcttaggaactgggtaagatgatcacaggtggtcatggcttctctgctcatggagctttagtttgatgggaaatccagcaactgaatgaaatctctcaaaaacaatgttctgctattattcaactggagttcatctagagtctttaggttgatctgtagatgttattaaggacaatttcctacgttgggtgggaaattcatatagatcattaaaatccccagtcatcctaaaatggcatataaagaacatatgttaatttttaaattttatgttaataatttttaaatatgtaccaaaatttcaagtaaaacagaatctcttagagccattaataatattgttactggtagctctaaatagtcttcctaagctttgacatggtttaactgcaaatcctatttaaaattttggtaaggctcttgtgattatcactatgaagagaattacttgtctgccttggcataaagagcaaaaataacatttttgattacctgcttgctatcgctcttcccctatggattctaaactttacagggaaagagtccttctgtgtcttatttacccagccacagtgcccagcacaaacccagcacataggagcagcatattaaatgttgaatggatgaatgaaacttagagaagcaagccaaacctcaagtactattattaatcaaatgtacttcctcttgactgcacattgcaaattcaaaacatgctacagttctttaccatctcacttaaaatgtgcaagtttcatgtactcatcattatggaattttgtatgcaaggctttaaatcagtacagattttagatgatatttctgattaatgtaaaataacacaaggattctcaagtactgtagcttccattaaacacttaatttttgatatccaaatacttgtgttttttagaagcatttttaagttaaacactaattagcctctttaagtaatctaagatgggtttctgtcatttgccaccaaagagagcaaactcttaacagcatctttcatctcaagggactgatgaataaaatttgcagatggcttaaaaatgataagttgcattagtttctaaaaagaaacattgagaattttatgttgagtttgcaagagataatctgtaggataaatattctgctttgtataatcaaaaagtcaagtggtgattctgacattcagtatgaatggatccagacactcaaacaacattcaccacaatcatgtaataagatctcaaatttaataaaactgaattattggttctccttccaacccatttaaatcctctctcttctgtgatagtccccatttccataaattccactccaatgtttcagtttctcaagccaaaaatctcagagtcaccctcgagtcattttctctcataccctacgctagatccagaatcttacttttagatttatcaagaatttaccacttctggccaggcacgaggactcacgcctataatcccagcactttgggaagccaaggtgggatgattgcttgagctcaggagttcgagaccagcctgggcaacatagtgacactgtctcactatgctgagacagagaaaaatataagagaattaaccaggtgtggtggtgtgtgcctgtactcccagctactcaggaggctgaggtgggaggattccttgagcctaggagatcgatcagagctgcactgaaccgtaattgtgccactgcacttcagcgtgggcaacagagtaaaaccctgtctcaaaaaataataataaaaataaagaaataaaatataccacatcttacactgctgacacatcaaggcaagctgcctccaactctctcctgtagatcagggcaatggcctctcactgttcatcctgtttctgcctttgccttgacatcctgataatgtcacttccctgctcagaacctttttgtcacttcccatcccactccaggtaaatgctaaatccttaaaatgcccaatgaggccttatacaatccactccccaatctctgctctgacttatttcctattcttttccaccttgctcattccactttacttcaggacctctgcatgtactgtttcctgtatctcgaaagctcttcctccagatacccacataatgcactcccccatctcttccacgttgtcactcagatatcacctgggtgccacctgactgcagctccaccttttctgatgctcttgtctccttccctgttttatccttgtgcatagcctcagagccaccacatgtactgtatctcatggctactcacttcatcactgtgtccccaggacatcgttgtgtcctgccttagccggagtgtcagccccttcagggcagagctatggcctggtttgatcattgctctcttcccagagctctactccagtgcttaagtaatcacagtcagtgcccaataagtatttgttgaacaatgactctctccatcactgtctctgctccatggcagcatcactctaaccaagttctctcttcgtggcagaaagattgccaccagcacctcaagagaactgttgtctcttggccagtcacactgggaaaggtgggcagtttctttctgattattctacccagagctaagtaggcttctcattgattcatcttgggcaaacaaccaactgttgtttccagttgtgagaaaaactggaccagcctggcctgaaacacatgcccagactcccctggaacaaggggattctatatttttatgcctttgctaattattatatgtgtgagtatacttggggaaaaagaagaatgccaaatgatacaatcacttttgcatttgagtctttgcttttctaaatgaaatgctcatccatgtaagtggagccaaaatcagttacctgaatgtaaggaaatcaagtaggtatgctttttttttaattcaactttttttatttgttttttaatttttgtgggtacattgtaggtgtatatatttaaggagtacatgagatcttttgatacagatatgcaatgtgaaataagcacatcaggaagaatgaagtatccatcccctcaaacatttagccattgaattgcaaacaatataattaaactctttaagttatataaaaatgtacagttattattgactatagtcaccctgttatgctatcaaatagtaggtcttagtcattctatttttttgtccctgttaatctccacttatccccctcaccccaaacccctcactacccttcccagcccctagtaatcatccttctactctctatgtccatgagttcaattgtttgacttttattttattattatttttccataggttagtggggtacaggtggtttttggttatatgagtaagttttttagtggtgatttgtgagattttggtgcacccatcccccaagtggtatacactgcacccaatttgtagtcttctgtcccttgcccccctcccaaccttccccccaagtcccgaaagtccattgtatcattcttacgcctttgcgtcctcatagctagctcccacatatcaatgagaacatacgatgtttggttttccattcctgaggtacttcatttagaataatagtctactatctcatccaggtcactgtgaatgccgttaattcattcctttttatagctgggtaatattccatcatatgtgtgtgtgtttgtatgtgtatgtatatgtatatatatatcacagtttctttatccactcgttgattgatggacatttgggtggattccacatttttgcaattgtgaattgtgctgctataaacatgcatgtgcaagtatctttttcgtataatgactttttttcctctaggtagatacccagtagtgggattgctggatcaaatagtggtgctacttttgttcattaaggaatctccacactgttttccacagtggttgtactagtttgcatttccaccagcagtgtagaagtgttccctgatcaccgcatccacaccaacgtgtactgttttttgattttttattgatggccattcttacaggagtaaggtgatattgcattgtggttttgatttgcattccttgatcattagtggtgttgagcattttttcatatgttggttggccatttgtatattttcttcagagaattgtctgttcatgtccttcacccacttttgtatgggattttttgtttgtttttttttcccgctgatttgagttcgttgtagattctggatattagtcctttgtcagatgaatagattgtgaagattttctcctactctttaggttgtctgtttactctgctgactgttgctttgccatgcaaaagctctttagtttaattaagttccagctgtttatccttgtttttattgcatttgcttttgggttcttggtcatgaaattcttgcctaagctaatgttgagaagcgtttttccaatgttatcttctagaatttttgtagtttcaggtgttagatttaagtccttcatccatcttgggttgatttttgtataaggtgagagatgaggatccagtttcattctcctacatgtggctagccaattatatcagcaccatttgttgaaaagggggtcctttccccactttatgattttgtttcctttgttggagatcagttggctgtaagtatttgggtttacttctgggttgtctattctgctccattggtctatgctcctacttttgtaccagtaccatgctgttttggtgactatggccttatagtatagtttgaaatcaggtaatgtgatgcctctagatttgttctttttgcttagtcttgctttctgggctcttttttgattctatatgaattttagagttttttttataatcctttgaagaatatggtggtattttgatgggatttgcattgaatttgtagattgtttttggtagtatgatcattttcacaatattaattctacccatccgtgagcatgggatgtgtttccatttgtttgcaccatctatgatttcttgcagcagtgttttgtagttttccttgtagaggtctttcatctcctggttaggtatattcataagtggttttttttttttggcagctattgtaaaaggggttgagtttttgaattgattctctgcttggtcactgttggtgtgtagaagagctactgatttgtgtaccttaatcttgtatctggaaactgctgaattattttatcagttctaggagttttctggatgattctttagagtttttgaggtaaaccatcatatcatcagcaaacagtgacagtttgacttcttctttactgatctggatgccctttatttctttttcttgtctgattgctctggctaggacttccagtactaagttgaagaggagtggtgagagtaggcatccttgtctttttccagttctcagagggaatactttcaacttttccctattcagtataatttggctgtggggttgtcatagatggcttttattacattgaggtatgtcccttgtatgctgattttgctgagggttttaatcataaagggatgctggattttgttgaatgctttttctgtatctattgagataatcatgtgatttttgtttttaattctgtttatgtggtgtttcacatttattgacttgtgtattttaaaacatccctgcatccctgaagtgaaacctacttgatcatggtgggttatctttttgttatgttgttggattcagttagctagtgttttgttaaggattttagcatctatgttcatcagggatatcggtctgtagttttcttgtttggttatgtcttttcctggtgttagtattagggtgatgctggcttcatagaatgaattagggagggttcagtctttatcttgctgaatagtgtaaacaggattggttccaatggtctggtagaattctgctgtgaatccttctgctcctgaacttttttagtcggtaattttttaattaccatttcagtctcactgcttgttattggtctgttcagggtatctaattcttcctgatttaagctaggagagttgtatctttccaggaatttacccatcccttctagattttctagtttatgtgagaaaaggtattcctagttgtcttgaatgatcttttgtatttgtgtggtgtcagttgtaatatctcccgtatcatttcttagtgaagttatttggattttctctcctctcttctttgttaatcttgccaatgatctatcaattttatttatctttttgaagacccagatttttgtttcattaatcttttgtatttttctattgtttaaatttcatttagttctgctctgattttgcttatttcctttcttctgctgagtttgggtttggtctgttcttgtttctctagttccttgaggtgtgaccttagattgtcagtttgtgctctttaagtcttttttatgtcggtttttagagctatgaacttttctgttagcattgcctttgctgtatcccagaggttttgataggttgtgtcagtattgttcaattcgaataattctttaatttccatcttgatttcatttttgactcaatgatcactcaggagcaggttacttttcatgtatttgcatggttttaaaggttccttttggaattgatttccagttttattccactgtggtctgagagagtgcttgatataatttcaattttttaaaatttattgaagctcatttcatagcctatcatttggtctatcttgaagaaagttcccttcactgttgaatagaatgtgtattctgtggttgttggatggaatgttccgtatatatctgttaaggccatttgttccaaagtatagtttaaaaccattgtttctttgttaactttatgtcttgatgactgtctagtgctgtcatggagtattgaagtcccccactattattgtgtggctgtctcatttcttaggtctattaataattgttttataaatttgggagctccagtgttaggtgcatatatgtttaggattgtgatattttcctgttggacaaggccttttaccattatataatgtccctctttatcttttttaactgcagtttcattaaagtttgttttgtttgatataagagtagctactctttcttgctttttgtgtccatttgcatgaaatgcctttttccagccctttactttaagttttcatgtgagtccctatgtgttaggtgagtctcctgaaggcagcagatatttgtttggtgaattcttacccattctgcagttctgtatcttttaagtggagcatttagcccatttaaattcaatgttagtattgaggtgtgaggtaccattccactcattgtgctatttgttgcctgtgtaccttggtttttgggttttgctttttatgttttaaattgtattttttttttataggtcctttgagatttatgctttaaagaggttctgttttgatgcgtttccaggatttgcttcaagatttagagctccttttagcagttcttgtcgtggcgatttgtctgaaaaaagactgtatctttcttttatatgatgcttagtttcgctggatacaaaattattggctgataattgttttgtttgaggaggctgaagattgggccacaatcccttctagcttgtagggtttctgctgagaaatctgatgttaatctgataggttttcatttataggttacctggtgcttttgtctcacagctcttaagattctttccttccccttaactttagatagcctgatgacaaagtgcctaggcaatgatctttttgtgatgaattttccaggtgttgtttctggttcttgtatttggatatctaggtctcttgcaaggctgggcaagttttccttgattattcccccaaatatgttttccaaacttttagatttctcttcttaggaatgccgattattcttaagtttggttgtttaatataatcccagacttcttggagacaatcatattttcttattcttttttctttgtgtttgttggattgggttaaattgaggaccttgtcttcacgctctgaatttctttcttctacttgttcaattctattgctgagactttccagagcattttgcatttctatatatgtgtccagtgtttctggaagttttaattttttgtatttatgctatctatttcattgaatatttcttccttcacttcttgtttcattttttggatttccttgtattgggcttcacttttctctggtgcctccttgattagcttaataactaacttcctgaattctttttccagtaaatcagggatttcttctttgtttggatccattgctggtgagctagtatgatttttgggggttgttaaagagccttgttttgtcatattaccagagttgtttttctgattcctcctcatttgggtaggctctgtcagagggaaggtgtagggctgaaggctgttgttcagattcttttgtcccatagtgtgttcccttgatgtagtactctcccccttttcctatggatgtggctttctgagagccaagctgtagtgattgtttatgtctcttctgggtctagtcacccagcatgtctaccaggctcgggcttgtactgggggttgtctgcatagagtcctatgatgtaaaccatctatgagtttctcagccatggataccagcacctgttccagtggaggtggcggggctgtgaaatggactctgtaaggcccttagctttagtggtttaatgctctatttttgtgctggttggcctcctgctgggaggtggcgctttccagagagcatcagctgtggtagtatggagaggaacagttggtgggccgggccctagaactcccaagagtatatgccttttgtgttcagctaccagggtgggtagggaaggaccatgaggtgggggcaggactaagtgtgtctgacctcctcctacagcaggtcttgccgtagctgctggggggatgggcgtgaggttcccaggtcaatagagttatgtacctaggaggattatggctgcctctgcagagtcatgcagattgtcagagaagtgaaggaaagccagcagtcacaggccttactcagctcccacgcaatccaaagggccagtctcactcccactgtgcccccactgacagcaaaaaagtccgtttccaggcagtgggcaggcagggctgagaagtttccccaggctacccacctcccagctgggaaagaaaagggctctaattcttcctccacctataaagtctgcacgccagattcactctctcccccaggttctggccaggaagcttctcaaccagttaaaatagttacaaagttcagctggagatttccttcttgtggtggtttcctcgtgcctctggccaccctcccgaaggatccctgtgatgccaggcaggagtggcctgcttggggacccagcgaactcacagggcctttcccgctgcttcttctacccctgtatttcactcagctcctaaattgactcagctctcagctccaggtaaggtcggaatcttctcccataaattagaccttcagtttccccagtgggggtatgtgtttgggggtggaggacctccctttcccacttccacagtttgagcaatcacagtatttggggtgtctcctgggtcttgcaggagcaatccacttccttcagagggtctgtgggtcctctcaggtttcctgttttattcctgcagttgttctggaactaaaattcacaatgcaagcctccacacactgctctgtccatccgagtcggagctgcagtctaggcctgcctcccgtttgccaggatctgttccaagtaggtgtgtcttggggaagtgaaaaggaaatgtgaataaggcaagcactgaaagaatgagtctgaatgtttcagacggtttttattaaatgactattgctacctcaaacacagaatttggaagttctaaaatttttatatatatgacttaattgtataattgtccagtctgggttttggctcaggatacacattattgcaaagttttccaaatttcatatgtgatccacctattttgccattttttccaaccttttctattaatatatatctactatttttttcttaaaaattgaccttctatttttacttagataaatttaaaaaaatggaaactagctttttatctgagcaatgtagaaccagcatcattgccataaatagatgctaaccaaatagtaagtttaataataataagtagaatgaaaaatagaccaccctcctttttaaatactaggaacatattcttgcctgttgaaacctccaaacctgctccctctttgtttgtgatgttagtatagaggggatattaaagacctactggctcccaaatctaactttctcttcaagctatgggaagattacaagggaatttttctgcaggtgactgaatgctatttgttggcttttctgtgcatcacatcccccagtgcatgtgatctaatcatgtttgtatatgacacaccataaatcacacatataatgcaatacaagcctatcaatgtgcattcctcagattcaggagggtgtttttttcccccatctatgggcttcagcaaagttattcctagttttgtaagctctgaagaaacataacaatataatattgaactttaccagtattcaaacaggaattttctgctaatatagaatcaggaaaaattctgactaaatgtgtaaaacttatgaactttattttgtaagagttttggcacttttttgaaaatctgccccacttgcctgtgaatcttctagaccaagattgtccaacccacagccagagagccacatgtggctcaggacagctttgaatgcagcccaacacaaattcataaactttcttaaaacattatgagattattttgtgattttttttaaagctcatcagctatcgttagtgcattttatgtgcagcccagaacaattcttcttcttccactgtggcccagggaagccaaaagattggacacccctgctctagacaattgtaagtgttctgcttatagtttataatctcacatatttttattatgcaaaggagaacttttggtcaaggaaattcctagacgtcgaaaaccaaaaatcaaagaaagaccttccctggcgttctaggttgggtttcagacgagttaaaaagtagatgattttgttgtgttttaaaacattgtgtcaatttcctttgataagaaattagatccatttataatagttttcagtgattccaaaacaaccgtatcttactattgggggggtgcataattggcttttgtttttgattacatgatcgttgcacaataccacatgtttaagcagcttagttacaaatgttaataattatcttaagtgaagtccaagtgcaaagcgtaacttctagctactagttataacaactttttatcaggtaagtcatctcattaccatcagatggccaagaaaaagagttgagaaacatactgagttttgtataattaatcacagcaaacatatgttcttaaaatttcatattttgaaagtaaatgccagcttcactgttaccactatgagacatcaccattgaaagctccaggcaataatattctttaacaacctctactttgtattatataaaggaaaacatttattttagaaaatttgggggaaaaagtctatagagaaaaaataaaattcactcataatcctatcactcagaaataccataattaatatcatttgtctttccttccagacttctgttctatgaaaagtttctcttatacagtggaggttatgctgtgtattttgttacctgtatactgtatcgtaactgcccgtggatgatattccattgtgatgaacgccacaatttatttagccattttcctgtggatagacatgtcttatattcccaccttcccagtttcatctaatcatggttatatgatagtaatcacttgttttcaggcaagtatctgcagagtaagtaaaatctatgaagctgatgttgaggagtctgaaaatcaagtgcacagaggatcatgatggatgcttaaggaacaacaataataaaaacctctcgagagaaagttatttctttatgtaacacttaaaattactgaaatgattatgtgtatcctgtcaattagtgttgtgatataaatctagtgatatgtcatcattttactaggattagttttttaccagttttttctaatttagcattctgccaacagtagaggttgacaggaaaaacctataggatatgaacgttgacaaacgatttccaaaaaatttcaaaatgtagactacttaccagtttaggtccagtaaattttggaactcaatcatcctattctgggttgcacttccacacaggttcaaatacaaaaagtaaaattagaagtcctagaagttacactatcaactatcccctgctcattcctaattcactacttgactccatacttttacaaaagttcattgtgttgcttcagagctatctaaactactggttaatagctatgtcagattaggctagtccaggctgaggcacctcaaatccccaaacctcagtggcctaaaactatacttttttttcttcaactcatactatatgttcatcatgagtgagattcagatctgatccattctgtctcccattctgtctccactcctgaacccagaataatggagcagccaatctctgggacttggcaatctcatggcaaagagaaaagagaggaaagcaaaccatactcttcaatgacttttatggctgccacttgggggtggcctatttccctttggcccacattccattggttgaggcaagtcctatggtgaagtcccatatctatgggatgccaatgagaaggagaattatgcctatttacaggcagggaaccacaagtcccatagccaacgccaacatcagtgagagctaggcagagaagcataatcctctcaaggtgcagaggacttaaacagagctggtttgaatccacataatacttctcactagtcatgtatcttagcaagcttttttaaacctttcattgtagtaaagtacacataacataaaatttaacatactaaacatttaaaaacatacagttctgtagtgttaagtcttttacatttctgtgcaatagatctctagaacccttttcatcttgcagaactggaactttgtactcattaagcaattctccatttccccttccaccagcctctggcaaccagcattttattttctgtctctgtgaatttttgactattctgaatatctcaaataagtagaattataaagtatttgtctttgggtgtctggcttatttcacttagcataatgtccacaaggttcatccatgttatagcatgtgtccaaattttatgtttttaaggctgaataatatttcattataggtaaatgccccattttgttcatccacccatcttttgaataatgctgtcatgaacatgcttatacaatctttttaaattttaactctctgggtccagattatgtatgtacagaaatgggctttattacaatgcaatataatgaggattaagtaaattatattaaagcacattctgtaatccctaacatattatagacgtgtactaagtattagttactaataatagcattttgaacatgggtgaaagtttctctggtccaaaatttcccaaatattgtcattcttaccagtggtggtaagagatgatcttaaggtagttcgcgaacattataaaaatttagaatgtttatataaggcattaaattcatttattttagagagtgcccaaaaatgtaactagcacatcaagctaattattgtgtgaatattattgagatgaaggtaaaatagatgtttaatttttcttaaaccaagttatttttttaaatagcaaaacatgacaaaaatgatacatgactgacgtttagaaaacagtaatatgattcaaaaagaacaaagttagaccctattatttcttttttgttttcctttttttttgttttttttttttctttttgtcatttcaaaaagtattcatttcaggctgaactcattcagcccacgtatgttgtgactcatacaagataaaccccagtgttctatttgcagtcatttctccctgaaggctgatgttggtataggtgatttaaccaaaattactcaaactttttgtaacctccaaacacacaccttttgttagaacaaaccatgctgtagtatagctcagctgcatcaaaccaaacctgtccttttatagtgctgtcaggccacagggtatcactggctttgggaaattgtcctaaaaattgtacattcatattatttgagtaaccagaacatggtcattagtatttcaaccctaagcagctgctataatttttttgttgttattagcagagcacagcagctcagacaatcttagctgacctaaactcattgtgaatactcacatcacagaattttaaaggcaacatagaatagtgttaaaagagacaaaaagcaaaagaaatccacagggaatacaatctcgtttggtgtcattagactcataaatgtatttgagttcttcctatctgtaagttcagctgtatttcccctatggcatgagtcaatgatgtttagaaatttctctggatagctaatgttttatatcatttttccattacaaattcagttagccaaatcacattctgtggttaaatctacaaatataacactgagggcaattgtgatgctgttgttgaatgaataatattatgtttgttgttgttattgacaagaaactgatttttccagtgccctatctgtgttgctattgacaaatactatcggccatccctcaacaccctcaccccttagcattagtttacagtccagcgttcacgaaaaggaactaaattatgaatctaagtttagaaaccgcagagagtttcattaatcctctaatggaatcctcattaactttttagcgttttgccttatttttctcaaaaattgatttaagcctggaaaacgaagacttttaaaatatagactctcttgcaatttttcatgtgtatagctattactccatgggaataaatctaagtaattcttatttttgattgcctcacattttgcccatcttatcatacaaggctggctccaaaatcatatacacttcatttcacagaactttaatctgtccatttggcaatttcttccagcctctgtatgcgtcaaaataagtcccgccgccttcctttcttggtttaggaacaagcagccctctagtggtagatagaggaatttccttatcccccccatcgacgtgttttcaacgagacacagtaagtgtgaaatgctctaaagtgtatgatgagcatgataaaatgaattatcttacacattaattgaaatgccttttttgggacttttattttagattcggggtacatgtgcaggtttgttacatgaataaattacgtgtcacgggggtttggtgtatgaatgaaatgcctttctaaaaaaaggaaatttatatactctgttatttttttctgatttcatctattacaccaagcattaccaaaggcatcccgttctacttccactagcttcctatgatagccgccatctcctccgtgtaaaatatcacttgtacttcgatctgttttaaaatttctcattttgcatttcaagctcccagtcagccaccaggaaatgttgtttggaatgccacagacactaaagtgttacttaattgggagcaagttaaagccatggagaatgagtcagaagtaacaggatataaagtaagttttctcatttgcaatgcttcattttcgtaattttggcagtacttttcaagagaagctaggtataagtgaatttttctatatattgatatggtttctgtaatctaattttgacaaagataccaagctttccataaaatgggtaatttttcaaaatagcttcttaaatatggtttcaagtgaaagaattctgctcaagtgggaattttggacacaatgtctccaaattgtgtgttagtttgctactattgatgctgacctatatactacttaaaaataaataaataaaactattggctctgattccatggccaggcattcaaggtccatacactatggccctgccttatctctccagcctcataaatacgcagcccagctgggcttttccacgggagaagttcactcttcccaagcctccctgattttgagaacctgatgattctgccatgtgctaacctctaatctaagacttacaattagagtcatgaatgaaacttacattctagtggatatagaaggacaaaattagttaatttcagagagacaaattctatgaagaaaacaaaaatgggcaatataacaagtaagtgtatttgttcatgcattttaggttttctataggactagcagtcaaaataacgtacaagtactgaacacaaataaaacttcagctgaacttgtgctgcccattaaagaggactacattattgaagtcaaggccacaacagatggaggggatgggaccagtagtgaacagatcaggattccacgaataaccagtaagttggttgaagccattatttactttattgacatcagtgttactatccgccatagtgagtcaatcagtatccctctgtccattctttctttccagcaaggcttacatccaaatgccggtaaggttttggcaggtgagacgtgggcaagaggaacccctcaagagtggtgcaaaatagggagaaaagtatgagggtgtgaagaaaagatgtcaaaaaatatttagcaaaacttcattaatttgattttttttccttattctgagttttacttaaatttgcctttggatctcctataaaagcagaattccctaatcatttcttttagatctttaatagtctagttatttgcctcctacaaattatagataaatcttatcaattctttaaatagaatgattaacattgtcaaagtcctaaaccacttacctgtgccaaactaaaagactccttaaaaattcttctcctagtttccaaggaggttcatacgaatttttcctctccaaatccaagtaaaacctattttactatagaaattatatgtttagagttggaaacagactttggtttgcgtattttatcaactgccaatgctagaataaattttatcctcactcttaaatcccaggtctggagttttctggcctcagtttaactattgtagagtccattttgacttcatatgctattctatagttcttagtgacatgactttgttccctgtttccattcatttagcatgggtaatcaggactgaaacttttgtctttaatcttggaaaacaaaatggcagacattagtaactgaagagaaacggaaatagaaaacttagagaaattctgtctttctgtaaaaccataaaggctgccatacttagactaaaacaaacaaagctacactaagaaaacaggaactacttattgcagaactaagttctgcaaagtaaaagtctgcagaacccatcttggactacagaactctctaaaactgtatgcacttcaatagagcaaaagtagaaattaaatttagtttattattgttgttaatttaggttttgaaataatgaatatgtgcttcttgttccctgaatggtgcaaggcatggagttaacattacaatatgggcaaagtggcaattttaaaagaaatatgttctaggcttttgcagggacagatgttattttagcattttagggctgctgagtcaagagtagccttttcatctgacatctgctgtcttgctgagcttgcaagtgaccacacagggccatctctatgaaaacgaagcttttatttattgccttttaaaaagattatgttttatattatgtgtaataatttatctggaaatgcataaaatagaaacaagcacagacccttcaaacccttacccaatgaagcattcttaattaaaccattgaattatctcaaagttgtttgtaatcaagtataattgttttcaaaatgattaagttgtttttcccatttcaattaaagttaaataatagtagatgaacaaagcctggtatcatttaagaaaacttaaacacattactgtttttatagatactcttggcaactagtatatgctgcattgataaataaaatgaaggctaataacaacttgtggtggttccaggataggttcacgtagtgatttggttttgataggagaggtattgcctttgctctgtgtcttagtcctttttggcttctctaacaaaactacctagacaggtggcttataaacaacagaaacttaattctcacagttttggaggggagtctgagaagcccaaggtcaaattgctggcagattcagtgtcacctctcgaagtccctcacctcctaatactctgacattgagggttaggatttcaacaaagaatttggggggaacaccacaaatatccagtctctagcaccctgattacatattggtacaatccttattaatgagctcttcatcaactttgacaggtatggatgcaagaggatccacttcagccatctcgaatgtccaccctatgtcaagttatatgcctatagtactgttcttaattgtatatgtcctgtggtgatattaactcctttttattatttattggaaagttatttggttaccaaaaaaagtgctttcatgaaatgcagtgattatgcatgtttttttcaactcttatttttaactttctacttcattataggtaaatatgaatataattaaaaaaacagtaaatccttttaggggaatctgaaatgccttaatattaacttgataaaccaaaggaatttacatattacatacttcagacttttgatataaatgttcttaaactatgagtttaagcactgcctatggataaagactcacacactctcacatgtacacacacacgcatgagaatttctttttacattgaaaaactctttcatttaattcaaatgctattttcccattataatagcattatttggaagacttaaccagtatcaatttgaaatgctgatttaagtccccaaggatgaaaaatacattttaaaaattattttgttggagaggagtggcatgtgattcaaaagagcattgttggaaaatgctactgtggggcttagaagaatgatgtttggtttggtatgctgctaactagttgtaagactttacaaatcactttgccatctgtacctctcaattattcctctataaaatatggagataataatacctatctgatcagactttgccccatgaattagtttttaaaagataaagactgaagtatgaaagtgcttttgtcaccccaaatgcaattgacccatgcaaaatattagcatgaatttatttaatcacataaaagtcatgaagaccagccagattttcaagcttcattctgtttcattcagttatattccaaaattcaaatgatcacattttattctttctcaaaaaaaaaaagtttttttaaattaaaaaaggaattgtttccttcacagctatgaataagctttcaggttttattaaaacctagaggaaaaaatcaggaatgacctgaatctcaacccaaatattaaacaaaatccacataatccctcatttcaatttccaattccattaagggaccctctctttttggatggcagagatggttttttaatgaaatcccaccatctatctgagtgagtctggcaggctttttagttcctgagttaaatttgtaatagaaccaaggcaatgctgctgactttgatatgtatgactcagtctttcaatatgtggttttcaaaaaattgttgaagacgtgacttcatagcaatatatagagaataaattaaaatcagcagattgagttttcaacattgcaaaatcagttttttacctctttcctaccaatttcacattttgcagaaacttgttcacatttccaacaatatcagaattagaaaacagttcagataacaagaaagattaaaaattagggaaattctgatatcaccataaagcactattttacatttagagattacatttaagataaagtcatcatacacaaaaacaataaatatttataactttctctataaggtccgcatatactgtatatattgaaacaatctgaatgactagtagatttcatatgaccattgttatttccactttctccaatacttgtattttatgctacatgtaatgaagttggacctttttattatttagtaattcctatatgttcctatacttttcattttcaagatgattgctctattgtttcatgttgtttctagcaatatatctccatgagatatgcactttgtttcatattgaaaagtataaaatttatctttcaattcctgtgtgtgtatcctatggttatctgtatgtattattttctattctaataaaatttataacaagcaaa

SEQ ID NO: 407 - DNA, 131319 bp, Homo sapiens
gggtcggaggagacgccagccaaagtaggcggagttgcggaaggagagtccgatctgcgcaatccagtccgggacttggctccgcccgggagcggcggcctctccggtgacagaggagtagtgagcggcacggggtgaggctgcagccaactccgctccccgcgcactcggctgcccaggcgctcggaacccagcagcggcgctcctccgcggtgccggtcgcccgcgatgcccgcttagcagcgtgtagcagcggccagcatcaccacacccgcggcaccgcgctgccggccgcagagccgggccagagccttgcacccctgccccagcccccaccccgccccccgccctgaaatgacttgttaatcggcgcagacaccaccaaggggactcaccgaagtggaatccaagtggaatttggatttggagaagagtttcttgaacatttaccctcttccttgttggttttctttttctttttcttctttttttttttggcttcttttttcctctccccttctccgctcgtcattggagatgaacacatcgcgtttgcatcccagaaagtagtcgccgcgactatttcccccaaagagacaagcacacatgtaggaatgacaaaggcttgcgaaggagagagcgcagcccgcggcccggagagatcccctcgataatggattactaaatgggatacacgctgtaccagttcgctccgagccccggccgcctgtccgtcgatgcaccgaaaaggtacgccccgggcgcccgggcgcgccccacctcccgggcagctggactccagcctgagggtcccggggccgtggctagcgcgtgctgtcggctttgtggtgcctgcgttttattttgtcttgtgtctctgtttcccgagccttgcccggtcctgggggagcagccgtgagccctgcctgcctttcctctctgccctgcgccccagagtgcgtccggctccacgtcgagagctttcccacccgcgttgcgcacacgcccggcgccgccccgggccgcgacggcgcgtatggctgttcctcctgggggtgtgtgtgcgagacccaaggctcatcctcccgcgtgcccagcagggagcagagcgggccctaaatggtgggattctcggaagctccctggcccggtgtgtcgaaggcaggggaaggggttctgccctcgagggctggagggggttgggtataacagcgctgttttcgtccagtgccaggtgggagaaggggttccgcggagacggtgtggaagcggagagaatcttttgttgtcagtgtggggtctgggctgggctccgtggagtgcaagaaacttgtaatggctctaggcacccgcgcgccctgtctctcggtgagatcctggctcctgtggccgctgccaccagaggttccgggctttgtttgctcgaataagtgtccgggagcagccgttcgggtgacgcggcgcccccgccatgggtcctgtcccccgccgcagctcccaacccgagcggcaaggatatagcccgtcgcggctgcgtccctcctgaagcaccgagccctttgcaccgggctggcgcacggtacgccctcctcccagatcagcgcggtctcgctctggaaagatgacccaggagggggaagggtgagagacctggcagaagatggccctgggtttgaaacccagactagggctctgttccgactcctcactgtgtcctagggcgctaccatgggggcaatggggcgctggagagtaagccgggcagtgcccacccaccctgcctgatccttctggggcgggaagtgtctcttgtcccgattctccgcgttttgctcagctcctcgctgtgggagatggtgcaaaacaggatcctgaggtctcctccctcctcgcaagacccgagcggcacggggggagccagggagcggtcccgggcttgtggacgtcgggaaaggaaacagaattccgctgtttttcccgctccctcgccgcccctccgcccagcgcctcctcccactttacagcggcggggtcactagaccaggcgctcctggaaagtttccctgaaagccaggggcggcaggcacgaccggactggggctcagcatgtgcagtctgagggaagccggacctggagggaatcatgcggacagctcgggatgcagctaggagctagatcccggccctttggagagtggaacctcctggcccgcggtacttgctcgacaagtcggggaagggatgaatggggaagcaggaccccggaggcaggtgcggccactgtggacagaggctgtggggaaggtgcgtgtggacacaggccggggctcagtggcttgcaagtaggcagcttcaggtgcagaatcccgagccatctgctccctgcgcacgatttcccagcgtggctatccagggagggaggaagcagagccaggtgtgcgtggagcgggagaggaatgggagactggaggcgctgtcttcacagccggggcaagcacttccagggagtctccggcctgtatcgcactggggagccctgcaggctttttcgcgtcggtctttgggagaaaggtggctgctttggaactgcggtggccaggcacagccacagtgggatcgctcctttttttacgctcagcttttttacgctactgaatgcgatctgtgaaaggtttaaaacacaggcgtgcatggacacacacacgcacacactcgcccttgtacgcacaactttctttacctcagatctgaaaagccgtttaacccacttgcagtgttgtgccagcaggtctcagaaaagctatttaatgccccccagcgctggtttttaagtcttgccaggatgggaaggtcgagtgcctttgccttgtctttctttagtcctgaaattgttcgtcgtccttcccctggtggacacatcttgggcatcaagtctgtggtatgctacagtgatggcggggaggactggtggtttaattaattatttaattatgttttctccccaaagtaaagatgcctatgtttaattctgactaaaaatactctacacttttttataccgtacccaaatggctaccagcggtcaagattgcaagaattttgtatgactttttaatgctgtgtttagtctacatggagcagttttatgatttacagtaagctttgattaaactactccaggcaccaaagttaattattaacctaaccttaaatacagtggcagaactatgtctccacctattaacctaaactatctattaaaaaataattgcactagctatttgaatttggtttacccatgcttgtttgtatggtaacttttatttgaatcttgagtaacccttactccctgttattattttggttttgggacgttcttgaatgaggcactttgcaaaccagtttaaagcagaaaagaacgaacatcaaatttaaaatcttacttttggttatgagtcatttttcaacttgatgtaaagaagcattctactttatgtttctgatgtacagtgtttgtgggtgacaaccttccccatatgttaggttttgcagctatcaccttttagagatgtgctacattttcaataacgcatataatccacatatgtaaatgttaagcagataccgaaaatcatttctgaggagccatcagctgaatatacttattggacataacaactaagcttaaataggtaaaaattttataagaaccagtatagaacactcaagtaaatgtcgaatgaatgaaataaatagtcacacatggttcatgtttgtccacttaaagtggacttctttattttccctacagtgaaaaaaaaaatatatgccttcaagtgagtggttatgataaggcggcaataagtgcacctttttatttacacacaacacacacccctcaagttcttccaaaatctagtaaatgctttttccaacattaaacacatatagcagttgtattttgagtaggcgggtaacattgcactagtgaagtctaatgtgttgaatcagaagtgtagcaagaattaggaagactgttatcttcaccaaataaaaatgaggcatccaaattaagaacttgtattaaattcaaaataagtagttatgctttaaaagtaaatgggtagttgcactcctatatgaaatggaaggaaaaatactattttgaaccaggagttaagtcagatagtttattctgtgtacattgtggttcagcgcttttcagaacaggacaaaagagtgatgatgggatgaaagtttttttagaactagattgccaagagctaatatagtctctccatcttatttgtttgcaggaaggaatcacagaacaagctaagctaattgcaaatgctttaattaagcatctgccatttgtgtaaggcaatgcctaggaaagcctatctctgcactgcccctctccacacccttctttaggtttagacaattttctgtcctcctagagtagaggagtgctccttgacatatttatatagaagctttgtgttatggcagccacatttgtgcatgttgaggaaggtgatgccttgaggcgttctgctgggccctcccatatcaggaaccccccccactctcttggggtgccttggagccaagttttctctgagatatttctatttcagcgtgaaggcttttctcatctgctttaaaatgtgctgcaagagcaactgagctattctctgctggcgaccacatggttgcctcttggggatatggtaagatagagaaaggagggaggcatttaatcccttcgaaatgggcaaatgagatgtcataccacacaaacctcaaggggaggagttcaggacaacttctcaccatgggactactgcatatagtctatacacaagggtatcttgctttgtgaaacagatgagctcttgcaaaactttattacaataattccatttacaccaatagagggtatcatataaaaccataatacacagatgattcccaaataacctcttcagcttagacctctctcctggacctcacaaataaccaatgcttagtgggtaggtagctcctcctgaatagacatctcaaacttaggtttaaaaaacctaattctgtatctttctcccccatatctgcctttctcatagtcttctccatcatagtaaatggcaactccattctttgagttgccggcccccaaatttagttctccttgaagcttctctgtcacacctacatccattgtggctgcaatgctgttggctccacctttggaatacctgcaggcttccttcaggtgttcctcctctgtggccctcaaattggccaagccatggtcctctcctgctaggttttcatgccagcttccccactagcattcctgcctctgcccatttctcaacacagcagccaaaacacagcagtgattttttttttaaactaaaccagatcagatcactactttgctcagatgttttcccatcttcttccaataaaagccaaagtccttcctatggcctttgcagccccacatgatctgcactcaggttccaacctctctgacctccaccccttgggcttgcttgaatctgtcaagcatggcatatacttggggtcctttgcaaggacttactctttcatgccttgggatggttctttccccagatagctacatgatttgcttctcatattcttcaggtctctgttcaaatgtcactttctcagtgaagccttttgatccccttatttactttactctttcccacagcactccccacctcttggcagtccttatttttttcttagcatttttcacagtctgacaaactatatgttgtccttgttgattttctgtcttccactagaacataatgccataaggatagacatttttaggctttattcactctggcacctaaagctgtgcctggcacatcatgggccatccataacaagtgtttgctgaatgaataaacagtgaatcatttttgcaaacaactagtctttattttatctattttgtctgcctttgtttttctatatcatgtttttatcaaatgagatacttcatgcatgcatgtgtgtgtgtgtacttcatgcatgaatgtgtgtgtgtgtgtgtgtgtgtgtgtacaatcttccaagcacataggtggtatggctcatgcatcattagtggaacattcactgtgttgtttttccagtggtagtgatggattggagcctgttcattcccacattctcacccagtcccctcctgtgtccaagagcacacatctgtgagacacctggttgtagctggagggagtctgagttaggtaaaatcaacttgccaagaaacagagctaagaagacagccagcatttgtggggattgagcttttgaccctggcctcatttgttctgcattctaaccactggccatagaacgttcatgtttttttggagtttgctaatagtagttttaaaattcaactttctatcaggagaatacagcatactttattaacccatgtttctgccctgtacccgtacagtatatctgctgttgaggatcctgcacttggagacaagaagacctgagttccagactctcactaccttggacaagtcacttaacttctctgtggctgcattattttaattgaaaattataaatagtaaacctattcttcctaacttataggattactgggaaaataatacgaaatcatgaatgtgaatgtatttagtgaaatattacacgcattgtggaaatttgggaagtttgatgttaaccccctctttcccactctggaccctggatataacagagatcctacttcatcttctaaattatttttggtagaatatacactgttcatgtagttttaatgtaaatcacattatgcaactaaataatatgttcaaattcattgaaattgtacagttcacctagagcatggatagcaactttattaattagaacacctaccatgtcaaggaaacattgctttcaacattatcattaaatcaggcaaggtcataggagtaccattctgccaggaattagtttaaaagtaagataattgtttttgctcagttaaattctgaaatagttcaaatcagtgtaacgattaatatgtcagggtgaaccaggactagtagaagtttccatctttgtcataacaaggccgaattcgttagatcttgtggcgtgaggttaataaatgtgaagggaccgttggagggaaggtagtggacaactctagaggcattgcggaggtcatgcttttttgacagacaatgcacgtggatttgttttgccatttaccaacagtgtgactttatgccagtttcctttctccttcagttttcatttgcaaagtgctagtatgatgataatgttatggttttgagaagaataaatgtgctaacatctgtaaaatgcatgtcacaatgccgggcacacaacaagcagtcattcaacataaggtattatttttacttgagtaacagtagttacgaaaaatgtcctaggaatggattttgaaaaagcagatagtacttttattctggggggcaggggaaatagtagaaaaggaaatggctacgaatctgtaatataaagagatgatgcaaaagaaaacaacctttggactagaaacaaacattcataccataaacaggccataatgtcatgggttttaagttgagaagcatgtgaatacatcacttgcagggaaacaggaaacagggaaactttggaatttgaaatatcacacccaaaacatggaaggaaaaaaccactatatataaaaaataataataataacaagcagagccttatatcaaataggagcccaagggatagtttttgaaaaatgatagctatcacttattaacattttaataataaaatgtacactctgcacctacatttagaatctgaaagcaactcataatgacaattttagggatgagttgaattcccaaggaccacacctgtcttaggagagaaactcggctgctgattggaacccttgaggaggttgtggctaggacttctgcaagagggtcttcaggttgggcatgcatctgccaggtcactcttccctggccaagcttgaaatcaatttgggagcaaaagcaaactactgccttccacaccaaaggtaggaaataattggctgaccccagtagagatagcagttattctgctgacagacacactactacaaaacctgaaatttgattcaaatgatagtcatacaagttcttatcagtgagaaaaatctgacttctaaaaggcacagcagaaggggaaataaattgatgttatcaccacaattccctgctaccattatgttttccaggaatgcctccatggcttagagttacagttattttcaactaggaaataaaatgttctcaaactctgtaagtggaaacagaatggaaagagtgtgagataaatcagtaattaacatgctgcaaggaccgaagtttcagatccttcttagcagccagtatggtgacttttgcttagaaagcattgttagtaatagatacttcctcatgcagcctttagacttgaagctttcttttaatattcctaggtgctttctaggaatttccaactaacctataattgtcatctgtagaacattaaattcaaagaatccatgccaattaaaaaaatttagcagaagaagctctaaagttggtgctgtttacgcctttcttagcccttctgcccctctacgcttcaaagaccagcctttggccatgatttgattagaagcatttatagaacagaacaggatctggcattaaatacaatgaaaacatgccattggaaaataaacattgttagagactacgaagaaataaagattgtattaattatgttttaatgttctatgagggttttacagacaagctgtgatagatccattcttctttccctgttcctattcctgattcgttttttaaagaaaagtattcagtcttttcattaatattgcagcgacttcagcacttccccgcccctcccccagactcctactgtccttgaatgaggaaactgagagaatactgattgagctggtgaatggaaacgttcctttcctgaaaatggaatgctttacaaaaaattgcattccacaaaaaaacactcaaaacaattcaacaactgtccctcctcctttctacccagagagccacttgatttcattcacatattttggtttttcaatgtatttgttcttaggcctaaaatacccaggtggaaaaccattctattaagcctttcactattttaaaaacatgagcatctgagtttctaagaacattctcattcctgcatagtgagcgataaatagaaaccaaattgtttgtagcattctaaactcaagtatattggcagaatggcagtggagttgatttttataagaatacttgttaatggttttcgagacggattctgtgctaattcttcttgtatcatgaatgatggccctagctagacactgtcgctgggatcttcatctgttaatcatggaggctgctttcttattcggttgccatagtttcagtgcctcacatagtgttggggtgtcttgggaaaggtttgagatatactagggcttgcaagccttgcagttattttgacagttgtgctctgaaagactgaaaaccgcttctcgtataattcagtgttggattaaaagaggcaacttctgagagtgtctccctggaccttgttatgtgcacatccagctggtatttaatccaggatttgcctcttgctcagtcttgctggcaaaaaaaataaataaataaaaatacagtacagaggctgatgtcactttcatatttcaacaagaaagcaaagggacgcaaactcttcattaagactattcacaaatgtggaggtaaatgaggccattcatgactttgcttaaaatttctgctccataatttggctttggctttgcagattactaaataaataaaatgacatcatgattgctgtgtgccgtgtgttattttggcaatggaaacatgtagagctttacttcaggtttaacctttccttttttacacttgacactcattgctaaggagctagagaccattttactgtattttgcaacaaaaggctcatacattttggactgtaggtctactgctttgtcaactcgtgaatagtatatgaacatttttcaattatttaataatttcaatattttgctatttttttttaggtttgtgactttagagttgattagagaatgttctccagtggtgtatatattgtgtgacttggtcaagaaaggatttggggagtaaattgctgtaagagggtgatacacatacacacattctggcgatttatgtgcttcacgtgtgatgcagaacacagcttgcttctggttggcaaatttggccttgtgcaacggatagtggtacacttcatgtttcagtttccatttctcaagtggactttcaaggactcctaccagtctaagccaagcaatttaattcctttgtagattaaaacataaaataatctcacactggaagcaaacagtgttgaattcaagacatgcaaagcataagtgaaaatctaggctgatttagaagaagaaactttgaattccttacaaatgggactaatctagaaaatcagtcatttttttcctttttactagaaaatgactagtttttatttcagaatgagcttcaaggcagcgttttaaatttctccagatccagcctgccaacatttttgtgtaagatcaacaagcatttttaatgcacgtgcctattttgttgacccatccgttacccaaccacattaaaggattgattttagaggccaataatgtgaagtaaattaaaaggataacatggccttaattgctactggtttcaccgggcttctaggcaccggaatttcttgtggagaaacactttaagtgtcacagcagtttttgatcatgtggtctggctcacccagaggcttcaattatctcccagcccttctccacctcccctcagatatctctgagaagcaaagaaaatgtgcatttgtaaattcagtattatggacccctgattatttggcagggtaagaaaataggttctgttcattttacagtattcgcataggctagatgtttaaacaacaacaaaagacatggaatggaggagaacagtgggagtaagatcaaagcttttttcattaaaaagaattttgttgaattgagttcattctctcaaatgataacaagattgtgattactcttgggtgtcgggttagacacaacattgcacacgtagcttaagaaaagtaaaaagtactttttgtgtagatgtcagtcaaatacaatgtggactttaattaaccttaattaatgatttctgattacagattttcttttgtgtgccttggaggctgtatttaggtagagtattttcagccagtagtgacatgaacttgcttcctttgtcttgccatgcaaaccacactagattctcattacaaggaaaaatgtgattctgcatcatttcagaatggtcatacaaagaatgaaatatcacttggggaacaactgaaatttgtaagtggtgtggagtatttgaatcttcagaggaaccattcctaattttaaaggaatttacctatcaaaattgctgatatttactggcttctggctggattcgaggccattccttccaaagattgaatgggattttgagtggtgccccagttctttcaaataaaagcatactgcagaagtgctggacctagcagcatttcctttgcccaagtgtaccctttataaagtactaaacatagcaactagggaatattgtagacactgtagagaattgggcctttgtttttcatgaagggaatttattaacaaaatattttgaggagtcttgtcttgttcacagatggcgaccacggcgaccccccttcctgcgggtgctgtcagagaggatgggggggacgtcctctatccaccccatcttcatacccgagggggcaagggctcgagggccgactgggccccaggtccaggagtctttgtcctatttcctcctgtggcccggtgtttgatgtgtaaggcagtaatacccagttccttgcacctctgagccatatcctgggcagccaacatagcagcatatggcaaagattcatctcggtctgccttcaccttcatcccaccagtcacacggcagagggtttctttgccagaaagatcagtgacatggacaaaagtgtcattgaagggtgcaacgatatggcggacaccaaatatgttttctccgtcagccacctgaggtcagaggctgatgacctgttcttccttttccttcccctttcgaggtgccatttctgcacgttgtctccagactccacaccggaaagagtgggccttatttttgattaaaagtactttttcctgtgtcatgagttttagaacaaatatcaaaaacctgaattaggatgttaatgtgctatttacattcaacttttaactagagggtctgataaaggttagatatgatatattaatgccaatttatgaattatatttctctgtgaacaattattttgtagcttatacaaaaccctaatagcatataacccatctagtttagtgtaattatgcttatgaattataaatgcttagcttttacaattagacttactgatctgtaggcaccttaatgagaaattactgaaattaaattgattcgtaatatttgatgtactgtgttccagggtagtggttgtctaaaataatttttagagtatgtgtctgactgcatagcagtatggctttatttttaatagaaaaaagtcctccctgttgcatgatcccacctttgtccaaggaggagatgtcaaaagttagaaagagcagagtagattcacatgtagccaagagaaaaggtaacacatcttttggatactttttttttttaaattataaagggatgttcagagtacagggaaaggtttctattaaaaagtcaacttttatctacaaggtgtttcctctcagttgtgatgaggggaagttcaacatgttgaatatgctggttaattaattctccagggatatctccgagggtgatgctttcgttttcatattttgttgtgtcaaaaacacaaaacctgttaatattgcccaaacacatccgttcccaagaattaaaaggacaatgtaattgcctttgctgctagaaaacagctacatccagttctctagcagatcttccaacatgccaggtgtgcaagacaagcctttgaaatgttgtgaataacttgacattatcacattgttattgaaatgcaaattctgcgtagaacatgaaagagttttaaatgtacgaataggacaatgcatgtcatcaaccatacctagtcttaacttgcttgttctgtggaaagtaaccataatgtatttgcatcttttattgtttttccttggccatgtttaaagtgctcaacacaccttcctgggtggcaccttgttggggagagaatagattggctcccagctttgaggtgtttagatagggctgttttgcccagtaaggagataacgtttccccaaatgagtcttgctgagttctacattagaattagaagtcagcttactgactgtatttaatggtgttattattaataataaagactatttatatagtgcttgtatttttcaaaatgtgtttataaacattgccttatttcatcttatcacaaccctctaggttaggcaggataggtattattatgcccaatttaaagatgagataacaggttcaaagaggtcaagtaatttgcctaagagcacacctctggtaagggaagggtgtggacaaggtcccaaaccatatgaatctgagttttgtgctcctccatatagctgtgttgtgtactcaatatttaaaattaaaaaaatattaaaattgtccaatcatagttctcacatttttcctattacatagaagtgagtcctgacatagaacaagtttagaagtagctttttgaggatttcgtctgaggctttagtgcaactgggacctaaattcctacttctcagtgaaataccattgctaggaggggacactcactgtctctggaggttcttagagtgtcttgagtcaaaatcaccctaagaaatatcaaatggcaaatggtaggtgattttatttgggattctagtcctattttatggtcgggataaaaataaatagttacataagggtggcagttttgaccctggcgcagggtagaactggagggacagaaggttgaattagatactctgtcaggaatatcctcctggggcttgcaactcttacctataaaacagaaacacgtttttagcaaggaatgaaatagactgcatggcacaacctaagtggatcttccctctgacaaaagtcattgtactctggttcaggctactagatctagtgaaagcagcagttcaatttaattcaatagataatttatttagcacctactcttggcaaggaaaagttctacacactgcagagatgcagcgatgaactagttcagaatttactggctgtgtacctactgtcggcccacatttcagtgaagaaggtagagatgtgaaaagtctttctagtctaaggcctgactattctctgtcccaaatgcagaatgcagaagatgctaagaaggccaaaagtggctctgtccagctgggaggtcaggctgggctccattgaaggaggaagcatttcaattgcggagtgaggtctccgtatttgggaggcaagggggaggaggagcagtggggtgaagggaaaagcaggagcaaagcccagaggtggggaatgtaggacttggccccagaacagcaaggggcctcctggtgactgacgcacagggacaaggtgatgtggtgaagccctgaagacagaggaggcattgaggcagcttgtggagggctctgcccagggtgctgcaggtggctgaagcttttcagcaagaggatgatgtcaccagatccgtgttttagaagtataaatctgctaggactgtgagttgaaaaaggaaacagattctgggtatgttggcatggtacagccaacaggatttgaggccagttggatgtgtggggtaagggaggggaaggagtaaaaaatggttccaaggtatcacctctggggagctgagtggatggttgtggcattggccaggacaggaacccaggtttacagacaaaatatttaattaactgctgtcataaaccgtatttaagtgacacataataagcaaaacaccaaagtccaacacctagttgcaaggctcttgtattggtccgaaccccgagagcgcaccaacaaacaacacaaggcggtgtggagtaacgcgctgttgtaatgagcccaggcgggctgaggcctaaaacggcgtcagccccaagtgcggatggggcaggggttttatagtcttctgtaaacaggaagtgtcccagtctgactgtaactgctacgtggtaccctgacggcccctctcaatctccagggggtacctgtcttccggccagctgtcttcctgcttctgctatctgggcgacgcaccaggccttgcggactgggcctgaggagggaggagttattcatccccccaagcttccaggctgggggagagaatctttcactagtcctattgtgctcaccctcagctcttcacaaagactgctgaaatttttgagtatgtttaaactgtagcatttggtcttgcagttgggaccactcttcaactttagggaggttcataccataatatgaggtggctaataggaggaagacggaagcacattcattgcatctataaaaaccactgttaaaaatgggcaggaggaccaagcgctaaatgatctgttcatgtaaaaatcggggcatatatggagccacctagttcctgtttatttcattccaaacaattttactttatgaaagtttttaaattctgaaattagatatacatgtgttctccctctccccccggctcaatgttgggcatatttatatgagtgtttgtctcttaaattgccatgtgcaactgaggtgttgcagacgatgtaattcacaaaacaaataacgcttaaattgtgttgtttttatactatttaaaagaatccttggccgggcgcggtggctcacgcctgtaatcccagcactttgggaggccgaggcgggtggatcatgaggtcaggagatcgagaccatcctggctaacaaggtgaaaccccgtctctactaaaaatacaaaaaattagccgggcgcggtggcgggcgcctgtagtcccagctactcgggaggctgaggcaggagaatggcgtgaacccgggaagcggagcttgcagtgagccgagattgcgccactgcagtccgcagtccggcctgggcgacagagcgagactccgtctcaaaaaaaaaaaaaaaaaaaaaaaaagaatccttaaatgatgggtattctctaaagcatgcggggcttaaaacctagatgatggattgataggtgcagcaaaccaccgtggcacatatatacctatgtaacaaacctgcacattcagcacatgtatcccaagacttaaagtaaaagtaaaaattaaaaaagatgggtattctatatttatctttcatgttacatttttctttgtggggtttctaaataaaacttgtaacatgaatgttttattctcattctgtattttaaaaagaagctgagtaacaaaaggaaaacaaaacaggattggaaaatcaactattttcagggggctttaacaaactgaatatctagaaaggttctagagaacctttatgaaactgtttgtttggatgtcttattttaaaggcatattagaagtaaacattaaggaacgatttgatttttaaaaaatgttgggacaccatatttgagttggtatcataatgccgagaaaccaaattatagattatttatctattacgtgccacattattgcatagttgtgctatcgcttgtttctaactttacttggaggctgccctctagtgttactgaatctcagcacaaccacttttgtttagatccccggaaaggtgacaaaacacacagaatgctaccatctagtcagcagctagagtgttaagtttatgatacatagtttgaaagattttgaataaattaaaatgtgcacatcaccagtgctcttgatggcatagaagacagcactggaaaaaacacacaccaatgactgaattgaagccatatccggaataccaagtctaacacaggttttaggactaccttaaccaattaacttcacttttattttctattttgtatgtgcaaaaaagctacatgtgataaaataagctctctctaaataaggctataagaacttctttagtttaaataaaaattataagtattaagaaaagcactttgcgaggccaaagcaggccaatggcttgaggccgggagtttgagacaagcctgggcaacatggcaaaaccccgtctctactaaaaatacaaaaattagccaggagtggtgtctcatgcctgtaatcccagctacttgggagactgaggcacgagaatcgcttgagcccaggaggtggagattggaccactgcactgcagcctgggagacagaatgagactctgtctcaaaaaacaaaaagaaaagtatttcaaccaccattgggtgggatgtgtttgaccagacagcctcaaaatttatgatataattagtcctcagagaagagttctcaaacttcaacacatttttctattacaaaccttcaaagagtagatccaagcactttaaagattattctctaaagatattaagaagagaagcacaccctacaacctaaatggtggtgttaagtacttttctcacagtagtgccaactctgctttttcttggatgaagaataagcatactccagagtctgcagaaagtggggagagtaaatttcagacacagtagctattttttgcatgtataatgatggcattctcagtggattatgaaggtaacgttgcaacactccaagtacatccagcttacagcagcagagtgactgacatgttttctataaaaatggttactggtaacagtggttttccaaagttctgaaactcagatcaggaagaacaactaaaatcatattagcgctacacacacacaaaatgaagctgaacaccaaaatgacacttggaagtcagcttttcttctagaggggtgttatgatagagtagttaaaagtatgggctctggaggttgctattctattggctgtgagatcttgggaacattacttaacatctctgtgcctcatattcatcatctgtaaaggggaaatactaatggtaccttcctcataaagggagtctgatgattaaatgaaacaatatgcaccagaatgatgtctggtacataaacactcaataaaaattagctattaatatttgacaccaaaccctcctaatataatgagctaaattcaatgtttttgtcaccagcaggatatgggttcttgacaagtaaaactaaaaagatgatgaggagatgatagtgtccagatgaatctttctgccagtttctgtctctttatgttcttttgtgtgtcagagcatggtttaaaataactaagtaagtaatcattatttcattttatgtaggaaatatagtacatgcctactatgtgcagagtgctaaattagatcttattggatatttctaaaatattaaataaggcattaggagttaggtgactatgttttgctacagttgttatttgcctttgttgggtccagtgcccagttaggagcctatgtttatcaggcccatggtgccttgagctatagccttcctgtcttctgttctcagaggaagaaactccgaggtcataatatcaagtatttcctcactgggtgagttttctgaatgcagtgtttagattgtaggtaatgtagattgtgtatttggaaacacaatactcagggattttcactaacaaagagggcccaaagatctctgtcaattaattagattttttaaaaatatgtatttatcttttagagactggtctcctgttgcccaagctgaagtgtagtagcatggcatgatcatagcttactgcagcctcgagctcctgggctcaagtgatcctcctgagtagctgggattacaggtgcacaccgagcctggataatttttacaattttttttttttgagggggggtcttgccatgttgctcaggctactccagaactcctggcttcaaatggtcctcctgcctcagcctcccaagtagctaggattacaggcatgagccactgcacctggctctgttaacttaatgtctgactcaaaaccaatgtatagatacaaacaagtttattttatataataaaactttgttatatgtggcattaactactcgtaccaataaactgaattttcagattgagtcatggggtttaaacacttgtctttcacaaaaccaaacagctgaactgctaaacagcaaagtggatagattggaaagtaaacccctattctgagcctgccttcacccctacttcactgaggtgtaatgaggagatagaaaagaagttgggtgagtcaagaagagaaacaagggctgatcattagctctcaagcaaacaagagttaattttggctttatccattctagtttactcaggtgggcacagcctgattcacaaaaataaggaacttgttggtcaggggttagggaatgtgctaacaaaagcttggagactgggtgtctctggagctggataatgggaactggggcccctccttcccggtggcagagaggattgtgttcatttggtatttacccaaagtcagaaccatctgacagctgtttggtgtttcttgtgaaatggacttggaccctgaccagatgctagtggacagatgttcacaacacaaaaggcttcatcaaaataggcactaattggcaccctcctgacaatctcaacaaataaggcaggaatgggctgtatctgctgttgaccatctcaacgcccaagcctgcctttcctggcttagggaggaggccctgttggggaactgagctttctccatagccagagatttttggttccagggcttcttgacatgaaactcccaaaaggtactgaatatttgttttatatgtatatatgcttgtatgtatatacttaattgaaaccttttaagaaggtaggccaaggaaggatcatttggacttcaccacccacctctcaccaaagcaagtcttaaaatgcagaattttctccacaaagttggtttctatgcagtagtttttgaacaaatactttatacaaattgttacgtattatcttaatatgaacccctccaaataaatgtgtgtattttattttatctgtgatgtagttttgtgcaaatatttttgctagatggattttaaaaacctaaagctgttttaaagtggatatttcaggggcaaactggtttgactatgccccataaatcattagatagggcttgctcctacttgtacaggatacaattaagtttgatttcaacagttcaactgtctttttagtgctagagacactttttgagtaagcattctctcctctttttttcctctgaattttgcaagttgggaacaaactctaactcctggcttattattaatactattggaatctgttcccatctatgtgccggcaaataataattctttctaaggcaggatgtagttttacaatgcatggtttaaaacacttttactgatgttactgtttattactgtttattacagtagaaagccctttcctactatagggctctctgtggccctcctcctatcattacctattgaagtctcctttttcccactcctctccaggaatacagatttaagaacgatccatgctccactacagatatttccaaaacacaattggtattaacccaggctggacacattttatcagtcatttctataattacttattttaaaaaatggtatacatggttgctgtatcgtatggagtgtgagaagctatcttatcatggtactattcatcctggttgaaaggatgttggttttttcccccctaacatctcactctcaggatttctctggaccaggaatccaccccctctttcccattctctagtgtggctcctgctcctttgaatgaaaggctgctctgactaaaggagctagaatatgcccagcaaccaaggccgggtactattgagtccattgtttgctcccagcactgtggagccaaatctcattttatagcacagtgtgttctaggaattccacttcatcagtacaacagaccttctctaatgccttcctattttccccatttgctgctgtcacaggcagcgccacacagtcctgtggcaggcaattataattcacttttctccaaggctctgctctcccccttttgcaagggaccacaaggcatcagctgccatattaaatagacgctaatgacaccaagtgtgagccgccagagctgtggttgtgatggtgtgtttaagatttaatccctttgagggactgaacctggagttcagaggtggtttcactgaggtttataagaaatttggctaagattatacttaatggattttcaagtactgaaaggtatttgtgtttaaagtgaatatgttaataaaactttccaaacacagtcacaaaaaatagatctgatacaaaattatgtaacgtattattcaaagtaatatagttgtctaataataatatattgtatgtgcatatgtgctgtatgtactcattttccctctatagttttctaagcggtttgcttttttctaaatggagaagtgtcctttggtgactcacaaagattcacaatgagcgaatgctccctagagcagggccaactcctcttgggcccttgtcttgctagaagatgcttttctcctggagacaggatcgccatcattagtaacttatccctacacccaatccacaaaagattttactctttaaaattttccagcatattttggcaatggtggaatgacaacgtattcatttttgtcccatctggcaacattttggcacctcttatgaaattattttctattggatttgtaaaagtgccccattagtaacacttcctgtaagtgtaaataggcttttccatagctgtcccttcaccgaaatagatcggttttgaaccttcctgccagtacagaggatgtggcctgatgctccctcacaagacggtggctgtctcaccttcatactgcccgggccgcttaactaaattgctccatggccttgtgtagctatgctgaaggatggagaagagcgtccctttaatgaacccggagtatttcatttattagcaaatcatcagttgacccagaaagtggccaggtaattagtgtaaagttttgcagagcttttttatatgcaccatctcatttcattcccatagacctctgtggcacctgcctttaccctggcttggaaaaatagaacttctccccttgactaaaaagacttagtctgtgtaaagttatgtgttttatcactttacccaaatattgttctttgtaattttcaacttaacacgctaaaacatactgaaaaaaaatgattgactacaaaatccttttttaaaggaaatgtgtacatcagaggaagcgttaggccgtaaatagtgttattttagacactctaggacattttaaagagcaagaacaagcctatagctcaccttgcagtgctctccaggttaatcagtgattctttgactggtgtcagggacatttggtgggtagtgattggcatgcctgtattttcctttgtcaccatttcttcaggttcatgtagaaaactgcagtcagaatctacagacaagatcctgtgactggttctcaggagaatccttgtgacaaacatctggcagatatgttttaaagtcctacgatagctgtcagaaagttgatggctcctgatacgttacattgtcagtccagacacactaattctttagtgggattattgatgttgttgtagcacatctgtgtttaattgcagacaggaagctgaaagagaaagcttgttgtgattacgacctctgagatacctattatatctgaacttaacaatcaggtcaaaacttagtggtgggtgggaatgaaaagatgtccgcaaatgaaactatgtgcatgggagaagagactgcatgtcactgacctgcagagaagccagtgcctgggttcaaatccatcactctctagctgtgtgacatcaggcaagctccttaacctccttgggcctcagtttcctcctttgtaagatggagtagtaatagcatctgccttatagggttgctgtgaggattaaattagtccatatgtatacattcccttgagttcccattacatcataagcactagataagtgtttcctatttttatatttccccccaaatcttctgctttgtaaaggtaaatcttctgctgatagaggatgagctgcaaagagaatgtgtgtgtgtgtgtgtgtgtgtgtgtgtgtgtgtatgctaagactatcatgcagaattgattctacacttgtaacacgggcatatttggctgttattgcctacgttatccattttgacacctcccctactctcaaagcccctgcatgtcactcgcttcctctgcttttccccttcagattatttcacccatgttctatttggtcatgacctgtatgtgtacctcatctaagtgatgctttatgaattccataaagccactcatctttgaggtctccaagaacagagactattccctaatgatccttttgtgcagtgttagttgttaaatgtgctaacggatgccagcgtttgaaaatggtgctgatccatgacctcttctgacaatgttagattcctatccttcagagtgagaattttaggcatgaggctgcttgaggtactgggttgcccaagacaaacctgatctccagggctgaagtatgggcatctatgaatcaatgcccatcaggtgattgtgatgatcagtcaatattggcagcctctgatttaattaatcatcctgagaataatgttccttatgtgtaagattattagaaagccaagttttctctcagagttttggtgcagatcaaatgatgtcctgtttttacaaagcctgaagcccaggtaaacctaaagcactgttattactgttattactgcagagaacctgtgtgctgtggaaggtccccaggctacagggtgcagagatgtccactgggcacatgctgacagatccttcaaaaaatggtacttaaagaagattagatcaacatttctgagaaaagcatctcttttgccttctcattggttcagtaaacccagttaaaggcaaagtttccagccctcagagcctgccatgggattcctgtatcattagatattgttaacattagcacttttggagtattatttcacagacatggtttcaatgttcagaaccaaaaggtggagaaatggtgtcagataaccttagagaggatcattttcttggtaatctctcctttcttaaaataaactagatattgctgacaatgtgaaatttgtgactaaccttcagtagatatgttgattttgcttttaaaataaaaaccaaggatgcttagaagtagccataagaggaaatattttgaaaatgaatgacctaaagtaatcaatggatatgtataacatttatattttaaaatgacaatgactgtgatttaaagtgcctctaaaaaaattaactctttaaccatcagtccctttccactcaaatcctaaagcaatgcagtttcatattttctgcttgtacaaggttaggatccatcactgactcaaacatgatcatttagacgaccatttagaaggcccaagagcaatgtaactggcatttctgggtcacagctaattgaatggaatgtgtgccgtgaccgatcgtacaggtagcacttgggcaaagaggtgtttgtgaaagtgcataagtatcgtttgtgtgttctgactattgtttgtatactactaaatgctctgaaaagtgttataatttgtacatagtatgaatgatttggtggagggaaactcccttgtgaattttgtataaagagtatactgcattcctgttgtcaccagaaaagtactgatatggcacattctgttaacagtaattggatatgtatgccttgttagaagagaagagggtaatttcccacttattataaataaaattattcttatttcatgtcttctgtttccacctgtttatattttgttttgtctgggcaatgttggtggagatgaaaagaaaattagcctcctaacctgcagtcagaggatagacaaccatgggtccctggggttttagcttgagctacctccataccagctccccattcttgtttccccttccaaatccatgagggctttatggtagtctggtcttctccaggagataagcatgatcaagatcctcctgcttctaatctctcctctccaggcttcagtgcttctgttctagtgccgagctctccatacgctatgggagggtatggaatgggggaacttattccattatgaatgctcacctctctgactccaagagaaatttttatttctagattcaggccctcaaatggtagaggcttataaagacttgtaaagtatgcttttagtaggtccctggcgatattaagggaatttagcatgtgatgttttttccatctaggttttaagagatgatttatcaggtccattttgttgtttgcttacagtgatttttatttgtatttttcgttgattcatcagagagcctgaaaagtgcttatttggtctttccatcagctagcactgagaacctttaaatcagtggtttagagtactctatctacaagatcatgctttacttgttgtatacttctttctagaagtagaaattgcagatagagaaggccaggcctgtcctattattcttttagtttccaaggcagcattcatttaagcatagcgtttaaaatgatattggataatgccattggataaaactcttttgcagaacagaactgtgcaaagcaatactgttttaaggtgaattgaagccatccaggcagagagaataaggttgtcttcttatctcttctgttgacttggtctaatctgtgggcagttgttccttggcctcaattttcccattggaaaggggatttttggaaacatatcttaaaactcttgagctgaagaagctatatcaatgaaaaatgtgttgtttaaacacaacaataacttttccgtggtatgcagcattatatttatacaccataagttgagaaaagccttgaaagtaacacaaataccatgaagcctgttttataattcctgactcccagaaaccctgagatgtattcacagcctgtagtcaccctccagaacccaagcaggaccttggaacttcactccatataccactccaaagcaagttttctgctccagtgtgatgagaaatgtgatgttcactgaaatgcaccgtgagtctggagaactactgttcagccaccttgggcatggcatctaaatgtacagtatcgagagtgtgatagccttccctggaaacaagaactaaggtccataaatcaaatctcaagtcaagagaagaaagccgtcaaggaaggcgaaggcattataactggcctgtagtgtccagctgtattgataccacagagctttggagccaattcaagactggtcaaccccaaagtgggaaattaagtttcagggctgccagacatccctgtttgcagatgtaaatgtaagtgataggataggtggtcttcaaaataaccatgctaccatgaaggtcagagtccccagcacaaatgtgaggccggggataaggttcagcacttttggagatggcattaatttgtagcccctaaaagcactttagctcctctcaaagtgtagcttacatattgcaaggatctgagtataatataccttaattaacagtgctgatcatgttccttccttatttgcagaacactttacattcacgggtgttgactcaggggatcatttggctttttttttttttttttttttttttaagtatcagatacatagcagtttacatcattggattttatcccctggtttagatccaaagacattattggccagtcttaatgcttgcttgttagtaatactgttatgaaataaaagcttctgttgcagaagcttccttaatagataaaacaaaggcctttaaccagtacgttacttagagaatattaatgaaatagttaaaaaatgaggggaaaatgatgaatgctttaaaaatactggccttttcaccttaataatgtgtcagaaccacttattttctacaacacatgtctcaaatttgctggcatttcaaattcttaggagttaattttctatgtttgaatctttaaaaagaaacatacaaatgtaggatgaatacattcagagggtttagtgcatgctttggctagcaattcaataaagatgacttggaaggatcaaagcaaagatttccataaaattgaatatgagatatttcagcaacatcaatgctatacctcttcaggacacttgtatgcatgtccacagtactacctagcatttacttaatgccactagaacaaaaaagataaattttgttgaggctaatagatttttaaaaaattgttttaaagtccttttagagtaccaggaaaatctgactcaaaggcaaacagcaaacagaaatgacttaatggaaatcagacaataagcctaaggaaaaaaaatagggttggaacctaaaataaattcaatatataacacctttccattttgttccctttcctttttgtttttcatgagaatctatatggaaaagtcagttgattgcttatcaggctgaagcctgtgtttgctcagactagcgataatgagcaataaaaaggtggtaatggttaaagtgagaggagagggaatcagggaaaatgggtgggctcagtatagtttgcaggctctgagttttggaagccctgtaattctcccttgtgctgttatgttcattggaggggagttaagatcaggatctgtaatgagtgtgggggctttccaggcagtggtctgatggctgcacaaaagaactcccagtgattacctagttacatccctacagtcagcttggcaagtaatcttaaagccttgctcctgaaccagcagcatgagcatcacccaaaagcttattagaaatgtagatgctcaggcctgataccagagtgcctggatatgaatctgcattttaacaagatcttcaggtgattggcatacacattcatatttgagagacactgactgaaggaacacatggacacaagatgtgaggacacatacagtgtggggtgcagtagtagggttatcctaggaaaagaaggagcagactttttagctagtgagctaactcattataggcatgtacagatgtttgttagtagtttatctttcaagttgtaaagcaatcagagtgtctcagggaagtcattacatggacctttacaagcctgtgactctgagcttgtgactctgtgtcataggaagccagtacttgcgtaagagccccaaggccatgtgggcaaatggagctgagataagaaagcctgataatatgaagagtgatcctaatctcagtggcctttgggattatggttatcaccaggttttagagctttgactctggtaaacaaagattctgcccttggtttccaacacatacttattattgaaatgatttattattttactgaagcatcttgtttccaaaatgaaccaccttagcctcctgaaatagctctactgtgtcccttgactttaaaaggcaaatgaggacttatgccattaaccctgcagagttatgatgaatggcagaactagatagggccatgaagatggcaggataaaaagatgcctgtcttcggagcacctcttttgaatggcatctccaagtcttcatccaaagactagattggttcttgtctccattttcccatttggagctgccatttttccatagcagccaagcccactaggtggtattagaaatgtcaaatgcttgttccctggtgccacaaagaaatagcacttgaacattaattttctcagtaaggcaatttttactttctgcagaaagggtgctcctcgcagatggaacacggccagagcacacctgaacaaaggagggaagcaattttttttttaagatgaagtttcgctcttgtcccccaggctggagtgcaatggcgcaatctcggctcactacaacctccacctcccaggttcaagcaattctcctgactcagcctcccaagtagctgggattacaggtgcctgccaccacgcctgggtaatttttgtatttttagtagagacgggatttgaccatgttggccaggcttgtctcgaactcctgacctcaggtgatccgcccacctcagcctcccaaagtgctgggattacaggcatgacccacgtgcctggccgagggaagcaatttttatcccttacgcagcttgtccctgctactgtgtcctgtctccattggctggagccagaccgcacaatctaagctaaacccgactggctatttcaaagagagcagggatatgagccagagtggtggggtgagtagtttggcaggaaggacagttaggaacaggtaactaagggtgacttaggtcagagcaggtgactaggatgagtcaggatggagcaggtgaccagaggtgactcaggtcaaagctggtgttggggaagagtcaggatggagcaggtgaccaggggaacagatgtgagctagtgattaggactggaaggaaagttgtttactgaaactagaagcaagaaggcaaagagaaccaggaagttaaactttaaatggagaatcaaagaataagacagctgaacatactgacatattgattctttgaagagaagcttggggttcactatatttaacagtggtatgtaaataaactgttttccccctggcatagttgcctctatcagtggagggtgaggctgcagataaatcctctgccacttcaccttttatgccaaagtctaaaggcaataaataccaagttagagaaacattgactagaaatggtgatatcacagtaatcacaaatctgttcttgtccttgcaactttttgacataatgatctcagttggccaggtacaatggctcatgcctgtaatcccagcactttggtaagctgagacgggaggatcacttgagcccaggaacttgagaccagcctaggcaacataatgagacccccatctctaaaaaaaaaaaatattcaaaaatttcgctgggcatggtggcacatgcctgtcatctcagctactcgggaggctgaggtgggaggattgcttgagcccaggatgtcgaggctgcagtgaaccatgatcatgctatactacactctagtctaggtgacagagtaagaccatgtctccaaaacaaacaaacaaacaaaaaacctcaatcctgtgtggcagatgggagacctcaggagacctctgtaaactgcatccatgccgtagaccccgcatccaagcagtgctgcatccaccagccttaggaaagtggatcagaaaggaaatgtctcagtgatcctagacactaactttgacaaggaaagaccacccatagtggaagtggttggaaggtgagccttcaaattcaagtaccccagttatttcattaggggccaaagagaattcttttttcctattttctactagggtgcatttaatctgtattagtaatgccacagagaacatttactgtcatataagcaaagaccttgcaaatgtattttaacagcagttcagaagactaaagaacttaacagagaagtagagaagagagagcctgcaaagtctactgtaaaagtaaaacgtgctagttttggcatcaatttaaccacattggagacttggtcaggagcactgaggcttgaccacattatccaaacacatctgcttgccttatcatattgtcccatttacttttctttttcttctgccagcacaaacttgtgtcagcatgtggaagtggtatttctgctacctaatctgtgttaaaacagccctgaagggtcatgcaactagtcggattgtaaacctttggagaagattaaacagtcatcatgtattaatcagtcttgaccacgttgtgaattaaaaggtgaaattcttggccttattctaaaagatgacaggtctagatgttagagataagcattgtttttatattagtcagtatttctatgtagccagttatgtttccagagtagtgagaattattctaagaagaaaaaagtattttcagtataaactaaacaagagaaaaatggaagtttaatacacatctgcagtgaacatgaacataggaaaacgtgaaaacgtgagcatagtgaagtttgaagtgggagagaaccttttctgaactgggttgctttgctcacaggccaggtaggagagagcaggggaggaggttttactggacccaagcgccttgtaagaattttccaaaaacattaagtaaaatttagttagttgtgaagtagaaagttagcacttctatgtcttcaaggaatccggttatagtcataacacagaaaaaccaatcatccctcccatagtagttgaaagataaaattgacatcttcttgaaagagaaaagctactattttatgagcttagaagaaaaaaaattcttcaactttatgatatgctatttgagctctgtgagtattcaaatatatgtacttacagaatctcagtgttgcaaatggaaaataatgatgctgtcttcaaaatgaccccccaaaaaaaatcagagaaagggttcaagtgctgctgaagtagcagcctctggaattaaaggaagtgattgccaggccggggaagtgaagcaaacagaatagtcctgaacagaagacagccgctgccctcacttccttatgcactgtgctgttcagcccaggcacttactgtttctctaagtgtgatgcagaaactagcttgaccagggtttaagataatggtaaccctcacaggttttgcggtgctccactttctgcaaatgatcaaacttcactgtcaaagaaatccagattctcttagaatcctagcagagtgtgatatttgacttttttgggtttctaaattttgttttcatttctttgatgcagtagatgtatggcccatggtgcttttaaattctctgcagtctaaagtaaatgacagggaagaaaacaaatattctctggaccccattaatgaaagacaaagggacagcgagggtcctttagaaaagggtattaaaaatgatatatgcctgtaaaaggtcggggagggatctcatgggaagaaataaagtgcaatagagtaatgaagaagaaaaacggtaatgctgaatgtcctttaaaagatactttatttttcaaagaagtgtccagaattctaacttatataaacactagaatattgatcagttatggtagcagactttggtgcacaattctcagactgacacatgatttggttagcaggtaacagctgtaaaggatgtaagaaataattatctgagattccctatgcaaagtcttaaaaaaaattctacaccaatttctgtatctcaaatgaagagggcatacaaagagacaaaatgcctgatggttccccaggatactgtcccagcagcagggacagagtccttagataacatggagaagaaaatgaatgggcactaccaatgtatttgccaagatatgacatgtgcttctgcacatgagacttcataactggataaataaagcatcttaaagaacttacgttctttttcttccctagatacccattcatgtgtaaaatgttaccgagttcacgctattttttgtttgtttgtttgtttgtttgttttgagatggagtcccattctgtcgcccaggctggagtgcagtggcgtgatctcagctcactgcaacctccacctcccaggttcaaatgattctcctgcctcagcctcctgagtagctgggattacaggtgcacgccaccacgcccagctaatttttgtatctttagtagagatggggttgcgccatgttggccaggctggtctcgatctcctgacctcaggtgatcagctcacctcagcttcccaaagtgctgggattacaggtgtgagccactgcacccggcctgctctaactattaattagtctttgaacttgtaatgacaataatgcgaacttagtactgacagaatgaacttgtgtgagtgacctcttagtataggaacatgtacagtgtttaacactttattatgtcatgttagtatgtggttgcttcctttcagaacattgctttcaagtgttattgaatgttagtaaacatgaaaaaaataaataagaattttggtgattcttacccctcttacctctagggtttctgaaaactgacacagtaggtttagataaagatgtgtggtgttaatttgaatctgccatactttgaatttagaatgcactggacacgttgatatcaccaattagcattctgtgtagccaggctagcatgtgattcaactgttgtgtttaccctccaccccaacacccatcaccgctgatctacatgaatgttatcaagcatttgcagcctgaaaaagacatgatgtagatttgactcctgtagtttcttccaaatagtatcaagtgcggcagaacaatatcccccgtaagtcacttacattgtcatcttaatattatcatgattgtgaattctgttgtcttgagatggatcgagaactttgacatcagttcagtattgctaatggaatatattatttacacaagactttttcctgtctgcattcagccatgtagaaatatactaccatcttaagtgccagaagatgctgatccgaagtagaagttgttggcaggtattggtgccagttagatgagaataaactgccaaggaagacactggagtgaaaaaagatagtttgggccaagtttttttccctctctctctcactcttgaaataggtatctaacatgcatatacacaacatcagtctataggaaatatgagggatgcttgattacaagcaaacagggacatgtggggccaaactctgcccccagcccctatcttgccatatatgtttctagtagagatgaaagtgacatgtgggaatgatggggggattcatgtcttctagacttcacagtatgaaagggaccaggccttcccaggaggaatggccagaaactgaagctatagccagaaatcaagggatcttttgtgaacacctaaagcaggagtttatccagggatagagatctccaaatggtggaagcaacatacaggcaggggacagaaaacagcctccatgctgtgcaagcataagtttgtactgatggcagagcctagtttggtttgcatttaccgtaatttttactcatctacttttaaagtggtatttgaagtgattgtgaatcaaaggcatgataatgcatacttttcccaatttaaaatatactgttttatatatgtaactacatgccttgaaaataatgagtatttgaatcctatcacattttttggaaaaaatatcagactgagcatataaagatcaatcttttacataaccaaccagtggaagaaaaggggttttgtaaaacgtatgcagtttagcgcaagaaaataagaaaaaaagaacttgcaatgaaaggaaaacgaacagaaaatagtgagatgagaaaattcccaagtacatttactcaataaactaaaactttactttaaccagacaaaagcaaaatgcattctatatctcctgtgagtttaagatacactgggaagaaaaattggcatgactcatgacttaaataattaaaattttatataaaaaccaagaggttaacaaaaagttcaggccagaagtaaaataataattaaatgtaaagtatctgaactgcaaaaatcctgaaaaataatttccaccactgatggaaatggttttaaccattctagtggtgaagatcaagttgttgaaggaaatccatcagttattatgtatattttagtgtgatttgaaggggattacaggagtaaaattaaagaaagtacacacacacacacacacacacacacacgcacagaattattaaaatgtattgcactgaaggacaagttaaccatactagaatctagggagccatttctcaggagtacaacctaagaagcaggatggaagctctgcacactgcccagtacagctgcagaggcaagaggattcttacaagtcatgactatcaatgatttgttttgttctcagattgcaaaacaaggaaaatgctttcatagcacgtcagattatgtgcctactcaatagtctatagatctttagcaaccttagaattaggaatatgtgacatatacttcagaaggaaagctacaaaaacaaaaattacagaatcaaaccaggattgcctccaactttaggaagcaggaccaccgtataaagcttgcccagatcgtcacagctaaaagcctgttgagaaaagttgtctagggccaaagaaataaatattgtctaggcttgaactctagcactgccattttggggacattgggttgtggtagataagaagaatagggtgtagatgtctgaaattatcttctatataatggagaaaaatttgcttgattgcaaacacacaattgaaaatattttcttagttgctatgaattacttccagtgaaaaatatgccaactccaataatttatttacaaaaaaaggatatttgtaacaaacaagcaaaggcaaagaaggaaaagaaaactctagaaaatacataggaaacagcatggtaatagggtgcccctgttgtggaataggccaggggtattgcagggtgaaaggttcaagatgatgatggtgatggtgacaaggtgatggtcaagcaggactttagttttgtctaaaatgtttattttatttatttattttatcattagaaggttgccatgtattatttgtatatttaatataagtacacaaagagtagctactaagaagtacattctaacaaatgtataatgagtttaaggacagataaaaaaatttcaaacttttgttgaaggcaaaaacacatctaattgaaattctgttcctctgagcagaacgatcttcaagacatatgtaaaataatagggctagaagtaccttggaaaacatggacctgaaaataattcattatcccagcacactgaggtggctccacgtgagtctgtcatctcaggacagaaagtggtgttgtgtcctggcagtccaagttgaggacacccactgctcataaaaaaaatatgaaattaaatattcagcaataaattgttttgaggaagacaaaatgcttttaaaggatcaacaaatacctatcattgcaaaaaaaactcaaaccaatgagcccatacagatggatcagaggcataatattcatgtgtaaagtatttggtccaagttttttttgtgtgttttgttttgttttgttttgttttgctttgtttttgagatggagtcttgctctgtagccaggctggagtgcagtggcgtgatctcagcttactgcaacctccgcctcccgggttcaagcgattcccctgcctcagcctcccaagtagctgagattacaggcatgcgccaccacacccagctaattttttgtattttagtagagacgaggtttcaccatgttggccaagatggtcttgatctcctgacctcatgatccgcccgcctcggcctcccaaagtgctgggattataggcatgagacaccgcacctggcctgttccaagtttttaggagcagatgaagctgttaaactttttgtttgtgccacctgtctatattaattctctgtattttccccatatgcttacttgcatacttatatggttattctctgtgtatttcctgtttcttttctctctttttttctaaatgtattgaaatttctgagaagatgaaaataccacctttatggctactcctaatggcaataagcgtagtcaccaacatttatttaatgttggctctttgttcaattaatctttgtggcaactgtaaaggcacaagttactttatctccatttgggggttaaatctgttgaaactctgaagaagaaaggaatttgtctctaggtcatgcaactggaaaccctggacttgaacccctagcactgatatatcctaggggttctagttcagattagactgatgctagaacccctgacctggtctccacagacccctcaacactgcttcacgtgcagagcaggaagcaccaggacatccttcctaagtggtgttaagaacttgatctgatgaagtatccatgtgtctttgagtaagtcatttaacttctctggaagaacagcttctttacaaagtaaggtcacatgcctcttagttcacacatccttcccagttctaacttttctgtgattgtattttcttttactgccctattctcaagaaatgtatttattatgaacacatgctgcagtttccctgttggtgggtctctatgtgtgcatgcatgtgtgcatgtgtgtgtaactgttgcgaacacttaccttctaactgctgttggagctgcttccagctaagtaggtgttccaaataccaggctgctcttattatggacttggtttaaaggaacgcctattctttttttcacacatgctaatacaatgtccatctttcctctcctaatagcccatgagtcttgaacttggagtcagcaaagtgctgcctttgtacagcacaaaagaacaccagttttgcttttttttttttttttttttttttttttaagaaatcacacggggactgaataaaaagcttttcgaccattcagaggctgcttgcattgtgcagctgttccttgactgctgagaacatctcccgcggacaatgcagtacctgaagagaacacggcacatggagctattcaagagttgcaggacctgggactggtgccagtgtcctctgtggaagatcgggggcctttcttcttggtcagaccctgataagcatattgcagtttgtggcagttgttgttttttgttgtttgcctgccagcattagtttcacaattttattgcaatgatgcattcccaacatgctggcacttaggggattttgttctttcctcttttggtcccacctccgtgaaatgtacagtgagactttgattggtcatagtccacttacagttcgcaatgcgttactgtgtggactgagttcccatgactcgggctccccaggacaatgtctctttcttcaccaagctgatggtaaatatctggttagcttcatctatttaaaaccagccaagcaggaatcctagtgctggagagaggattctttttttttttgtttgtaagtaaacaatggactcagttcttcctaactaaaattaaattccaatcactcttaaaataataccagaaggctaatccaattccaacagggggtgggaatggggttgagggtggcggtgggcggttaataatggcaaatttactgatgctggctgctgcttcacctctgtgcccaacatctgttttcatgactgatgattctaagaactttcctatgcaaaggaaattattatgttacttgtagttagaaagaactggctgaactaaaagccatgtgggcatctttatctgaaaccatttccttttgagtcagtagaattgagttgactgagttatttgggggttggtatttaattttttaagcattttaaaaatgcctaaaaactaaaaggctacgcaaaatgaccagcatatcttcttgctttagaatggcataaaagacttctgctttaagcagtctcagtatatgaaaatctgaattgttgaaaaatcaagagagtaggtgtaatctgttttacaaaatcatttataggagcagtctctggagcagaagctccacacctgcagttataacatgacctatataatagctggacatttgttgaaagtgctgcctctttcaacatccccctcagctcagtcttagcctgtttttcaaggtgtgtcaggaccgcatggaattagtaggacatctattataaatggtgattctttgtgggtccccttgaaccttagctgataggataggacagttagcataactgtggtattaccttgatcacagtttctaatcattcaaactccaaagatcacatacttattaggaactcctgctgcttactcatacatgcttactgcaacctcctcatgccaccatgcattttgctcatcactgcagtttctatttatctccacccaaatcctttctgtcctcttcccctaaccagctgcaaacacaattttgtgttgtgcaggacttgcagttctgcatcccactttctacccagcttctctgtttctcccgcaggtcagtgaccttattagttggtctaactttggcctccccatctgggtaaaactctccccaccatcactccacttccttctccttccaggcttttgtgctgtgtgctcctctcactgagctagcagcagtccattgccaggctgccctccttccttccttcaggccatcctagtcactgctcccaacacaatgtttgtgtatttcctgcaaaaggatatgtatttgtattatgctaaatgcttttcttccccaggctgagaggcctgatttatgtatatgcaaggatgagttagcatcttttctgacatttcaaatgctacaaaacctaaaatttgaatttcttcaggtactcttttttgagttacttgtctggtcagatttctgtagtccttctagacagtccttctgcagaaaagtataaagtcttcatctgttcattcattcattcagtaataacgtgcccattcctgggctaagcagcgggtgtccagtgaaaaaagggacatgatccaaggactcaaggaactcatagcctagcggggacaaaagatcaaccatccagtaaacatacaagctcatttcccactacagcttctggtcactagtatgaaaggagagaacggggtacattaaaaagagcagtgtggtgaggaggggctatcaggaacccacatagatgatgatttggtcaaagaagctctgtcctaggcagtaacatttaagctaagacctgaaggtggagaagccagccaggagcagtgaggggaagacttcactggggagagggagcggagtgtgctccaggatatttgaggactcaaaagacaggctggaatgtggtggagaaggaggcatgagctctccggagctgagcatcagagttgtgagccatgtagatgtggagtctgtgtgttgttataagtgcagtgggaagcactgaaggtgagtgacatggtctgatttatgctgcacacatgtgaatttcagcaaaacaaaatggtggcagcaaagacagggaagggaaggaattctagttaaatttaggaagaatcaataaggcttgctgagataaagccataggatccagtagatagtctgattgcctttttgaaagtagttttggtgaagttacagaaggaagaaaaagatagttttagaatgaataagaggttaggaagtaaatgtaggttgtgcccacccttggaaggtgtttggcaatgaaggaaaggacttttccctcaagggaagaaaaggtggagagaaaggttcgtttggaatagggagacaggcatatttagggagtatcagtgaattgggagagaatgaaactaccagagaaagggcatagagatggctgccttgtggaggctggagagaatgaattcccagcataggtgaaggagaggcagccatggacctaagtggagactggagggagtgaagcctggaggtgtgagggatgaaaggtgagggctgctggccccaggacctttgtttgtcccctgataaagatccaggcttctgcttaaagggcaaaataaattttgaagagagtagtagggtttagctacctcaggatactgagaggtgctgctttccagctagagaaaggagtgataagcagttagcagctttgctaaatttgtttcacagtccttccaaacagctacatactgtacaatttttctctgacagtgccgcctcgctccagagaaaagtatgctgatatactttggaaagattttcaataaaaagggctttctaaataacttttagtttaaccaggaaatcattcaaccagaacccccttcccccaagtattctagttagtcaaagttttactgaaacatgtcagcattgaaaaatgcaaaaggcagctaagtaggtctgactaaaaaggtgtaagaaatcccacatctgtgcacagagcagcagtgtcgagtctcttcaactgttaggcatttcaaacctgccatctccaatgcacgactagtggaaaaaaaaaaaaaaaggaaaaacaaagaaggaaatctatgacatagagtagaaagcccattcagagggttccagggcacatgtgtgtatttagttgtacagagcattttgaaatgttgacttagcaattaactcaaagctttgcatagtttgaattaacagtaaaagatcaaaaggccaaaactttaccaaatagatgtgtgataggatttattttcaaacagtcctgtaagaatttctgccatgcctacacagggccaagttaagatgtgtttgtgatctcttggcagagggggtggagaaacctgatcctgcactttgtaaattataaactgtttacacctgtcatctctgtctgtgtccctgttaatgataccttaacaattggctaagtgtgacaaaatgctaagagctggcactttcagagcaaccacatccagagggatgttattaatgtccactggagtttgagagaataacaaagcaccgtgacatacagaggacttttttttttcttttccagtaccgataagtctttactgattcattgattttcctagggaaaagagaagggaagggaaaagagtcagcatgtgttacaagatggttagaaaatgggaaagggagtgtccagcacagcaaaatcaaccatcaaataaacacaccccagtgatggggtcaccgaagcccagaggggctccatctcctgcagttcaggactgggggggagggatcagaaaaagaacaggcaggttacaggctaccctctctccctccccataaattcaagatttcacacaaaactttggtttctagcagtaaacatggagttacatttgtctgtctcctattaaacagtcttgtggccactttgacataaatttcttgcacctgcataaaagtatctcagtgacttggatatacattcatattccctttgttggccgcctgaccccactttctataccgaaggcccccagttgcttctttctactttaggattaaagattaagtaggcttgatccatccaaaatacagcagtgtcttaagtgtttggcataaatcacatcaagaaatggtgttgactcaggaggttgggaatgttagaaatgcttgttcctcggtgccacaaagaaatagcactcgaacataaatttaatttcctcagcaaggcaatttttacttctatagaagcgtttgacttgtaaatacagtaatggtgagagcacacttgaacaagggaggggaaggggttcttattcctgatgcaggtggtccctacctctgtgttgttcccctattggctagggttggactgcacagtctcagctaattccagttggctcttttaaagagagcaggggtatgagccagagtggcagggtgagtggcttggtgggaaggacagttaggaacaagtaactaaaggtgacttaggttacagcaggtgaccagaggtgactcaggtcaaagcaggtgactgggatgagtcaggacagagcaggtgaccaggggaacagatgtgaactactgattaaaactggtggaaaaggtttactgaaactagaagcaagggggcaaacagaaccaggacgttaaactttaaaatggagaatcaaagaataagagggctgaacatactgaaataattcaacaagaacccccttcccccaagtattctttgaagagaaacttgggaatcactatatctaacaggagcaagggatggaggacacctagcgtcaaaattttacacaaggactttcaccaccagattttgaatgtttttaggaaggtcctgggaaatgtctccagtcgaacaggagggcctttacacaaggtagattgggcccgggtgaaacatccagagggctccacgtgcctcagagacactgcactacaggtcctacaattcccaaaagctggagggaccaatctgcaaagtgcagcgtttactttgtgttgtagtcattgagtcatgtccatctgacctgcagaactgtgtagagattgcattttttaaaaaaactttattgaccccttttctctactctggatccccccaatccccaccgcctcccccaaccccacactcaactctagtatagtgccctgcacatagattaattggcacttattaaatgtttagtgaaggtaagattagggaaatgactatgatcagaggggcaatacacatagtacttaagaatgtgagcttcagagccagtttgtcccaggttcaaatccctgttccccaacttactagttagcaggtgaccttgggaagtctccttatctgtcaaatggggataataatggcatatatctaaagctattgtgaggattaagtgagtcattacacatcaagagctaggtctgtgtctgtcatacagtaaacacacaataaaatattactttgcaaaaataaattcctcttgggcagagagagcttttttgaaaatataccacctaaagaaaaggcaagcatgtatttttggtcactgattaagaaaggtaatacaacttctgcattttcattggcctgtttttaaaggtaaaaattttagataaatgtggggttttacccatcagaagtccaaacagttttaaataaaactgtatacagttttatcttaaaagcacccatgaacgcaatatgagtctactttaaaaataagcttctaaaatatttttttctcttaaaaaaagcttaccagattctgtttcattttggaaacaaattcacatctgggatgccagatttcaatcttaatacggtatggaacagctgagttataattttttaacctcccagaacacacagacctctgatgggaacatgggaaaggacatttatcttttcagctgcattaatatgaaatccgtgatattttagtgagctaagagaaaatacatattaaaaattaagaccatgcataacagggagtgcctacataactacaagactggaatttgcacaattactctccgtacagattataatgtcttttactaattactggaagcaatagtgcctttttatgttggcatgaaagtaatgtaaacactgagatatttctcttctaagatatttaacatttacaacatttagttcaaatgagtatatcttcaaggatattgaattatagccactttctgattgggaaaacaaaatacaactctgaaagaaaagagggaaatgttgattataaaatcgttcaattaatgcctaatttttgttgttgttgttgtcattatttttattttttcttctacttttattttaggttccgagggtatacatgcaggcttgttacatgggtaaattgtgtgtcattgaggcttggtatatgaatgatcccgtcacccaggtagtgagcatagtacccaataggtaaccttccaacctatgctccttcccccaacccgccctcaagcagcctcccgtgtttattgtttccatctttgtgtccatgtgtactcagtgtctggctcctgcttataagtgagaacatgcagtatttggttttctgttcctgtgttagtttgccttcagctaatgcctagttttaaaccataaaacaactctttctttctctttcttttttgaaacagtgtggatttgtggaaattcttcatggttttggaaccattgaaaactgagttttaatcctgcttctgatgttctccagctgcgtggtcttcttttttccctcctttattattattttaaattgtcacataaaaattgtacatatttatgggatactgtgtgaaattttgatacatgtatacaacgtgtaaggatcaaatcagggtaattagcatttccatcacctcaaacatttactgtgtttttgtgttaggaacattcaaaatctgcttttctagctgtttgaaaatatacaataggttgttgttgttcattatagtcaccctacagtgctatagaacactaggattaattcctcctatctagctgtacttttgtatctgttaaccaacctctagcaagctctccttcttcccatccttcctcacctctagtaattcaacactctcttatagctgtgtctcaaaatactaaaataactggttggaatataaaatatttggttaatccctattcacactaaacagactctttattcacactggccagattcttttttggtgtttgtgttttgttttcatgcatgaggttaataacacccttagagactgtctgaatgtccacccagtaccagcagagccttggcttattattatgccagtttcacaacttgaatccgttagttaatttaacatggtcagagaaaaactcatttgtctttttcatgtgtttcacagtcaaagtgacacagggtcaggcattatctgctggaaggggacggcgaaattaaagtcccagggtacagccattcacagcggtagaacggatgattatcaggctggatataattatagagccacagcagtcccccacaatacactggctatctgcctagcacaaaggtttagatccctaatttgttgcaggctagaatatctgtgaagtagccatgtatttttgtgtaccatcaatcacaacttaggcaactgctgctgtttgcattttggaagcttggcggctgttaagcttctgcctgcttttcagacaggaagataggatgcagggctgcagaaaggcttttagtggcagaatgatgacacctctgccagggtcctatcgcaagctcattagctgagtggatatttgagcgcctagtcagtttcaatacatacaaagtcatctgtttcattaagttaatttacctgagctggctctcctgacaatcaactgcttctgcagtatcagcttgatattgtaaaggcgaatgaggatggggctgggcaggaggcattggtcagcaaggtactggggtctgtgggattgtacttccctttaactgggcacttccagaaatccacattatatttgtaagcaagaaacctggctggaagtttactaaggcttgctatttacttttagtttcaatgaatgaaattgggaaatgagaagcaaatcgggtactatattaataatttaagaatatttttccaattgttaaggaagcgaagaaaggaaaaggaagcaaaagaaaagactgcacatttgttggttagttatttaaactctactgttcctggagagttctaaattgctttacaactagattcacctaaatgatatgacctacaggaaattgtatctgcaacttatgtcttgcaaaagttgttaattaaggaaaaacctgtattgttttccttcctttgtttggttctctaattcgcatctttgttcttcttttaatatgcatttgctttatgctttttagatttgagtgttattaaaatagtaacacctgagttggacttctgcctttagattagttggaagctgttaaaatttaatcttatccaaggttttgtgcatcacagggttgacttttaactgaaagtcgttactaactgtcacgttatactgttaactctgactacgaagactaatcattagactcattagaaccaactggtttgacaagaaaaaataaaagaattgttgaaccacaaagaatatgttagaaaaacatttgtatacatttgaggttaaacgtacacattaccgacttctttctcccagcacacaggacatcagctcttaggaagaaggtggataagaatttcttcctcaacctcccttatactttcaacttttcatggcttattgggtataaaagatcattgttttgaaagtgcttatgtgagaaatacttccatgcaagtagaaaaaagcgcatgtatttcctcgtattgaagcattaggaatagtttattttattttgcaaaccccaaatccatttgtttaatttggcaatattcgtcttttggccatgtttaattttctttttccaacattttgaaagatccaactctatccattttttagggcagaaatattcaattgcttctttttttttagttcagaaaaaaatatataatgttaagtatgactgtgaagaattaacttgtgtttgaattgatattttgctggagctttaagtaacagtttaaactttattgtcgggagtagacacaataaatatcatcttttcacacccaggagattcggggccagctatatctttctcagttcttatttcattgtccatataattgaataaaatatctaatgtaatattaaggtcacagatttaaaaatacagaacttggggaatgcaaaatttacttttctcaagataacagttttttcctcatgctgggcattatatgcacttaagctgtgccctcagcaatgtaactaggtcagggatttcatagaatgtgaaactgctgtgttactgtaagaataccagcatcttacatttcatgtatatttcaagacctgtatttgcaagtagaaaggcaaatgctgggtgtcagtctgatgtgcgttacctgggcgtgtatatagaacaggagttttgagctagcactaaggcctttaaaaaagaaagcctagtgcaatctatagtaacttcttcaagggcgacagttcattataaagtgagctaagtaagtaatataagccccttggaaaagttaaaacttaaaatctatagcgtttttctttcttatacgacgtatgtgtttatactttattttgcagctttttattggtatacctgtctaccccataatttgtaaatcctctgaggacagggattgtattttagatcattcattgatccgtttgtttaccaatcaaacattcatttgcccttgccaggttcactaatggtgtggatagattagtaaacaaataatgtcaatttgattgctatgatagagctcactcaagtatttcgaaagaaaaaagagagacattagtggttagttgtcagtgggaatcaggggagacttcacagagaaggtgatgtttgaagagtgtcttaagaaaagggtagaaattcacaaggcagaaaagggaaaggatagaaaagtggagtggggaggggctgttaataggaaaatgattgaaaagaaaaaccatagtcatgggaagagtagttcaagacacaaaggataaaaaagaaggggggaaaaggcaaaggaagatccaataagagccatccctccaaagccctcacccacccacccaagtcaatcgaagagtgaaaaattcttaaaactttctgttaggggcagtttattgaaattctggtatatattcttaacctagggcagctggctgctaggtgaaaagattccagagaggtttttaaatgctgcttcctccagccagccttcatctttgtactggccacagcacctgaaacagttccttgctcatatagacaataaatgcttaatttgaattgctgaaagtaaatagaagtaaaacggcccctccctttgaggtgtttgtaatgcagttgggaagagaactacaagccaagtagataatgacttaccaccaatgactataggctattcctcctttttacattggcacggtactgaaaaatgtgccctctttttcccaaaggaataatttaagtttccacaaaattttggttaaacaccaaactgccgttaccatcttctaagaaatataggcagctccagtgcaagacacagaaggctgtgggtgggaagttttgaggacagggggaaattggaactacagtaggaaaatgtttttaggaaacaagggatggtatataggtataggaaacaagtatacaaaattcaaaatgctgaaaggtgaggatactttgagtttccagtgaaactcaaaggatacaggagactgagaagaaaatggaagcttacattaattaaataactcttcatgggccaggagctctttatcctaataacagctgtacgaagggaaaacatcattatcccactttagagcacagaaacctgagccttacacagattaaataacccaaggccactcagccactaatggaaggactagggtggaagcccactagaatataagctccatgaaagcagagacctcttctgttcatggggaatactcagtgtcgggaacatgcctggcacacagtaggtgctgaataaatattttcttaaacaacccagacttcaaaggccatgtttacaaagtgatcagggttgagttagtcacagagaagataaacttttgtccttgctccaggaataaagaattgtctagataggcaaatgggcagacatgcaaaataaatatcaaactaatggcaaaaacaagataagaaaaatgaagagttcagagatgccattgtctagatctttacctaaaatacttgtgctagtagaaaaatggtttccttgtttccttgtcattgacccaatagctataacacagcatagagcatctgatcctaacccctaaagaataagctctaaaaattgtgtgtgtgtgtgtgtctgtgtgtgtgtgtgtgtatacatacccatgtaattatacacacattctataggaggttaggaacctatgaaaataaatggttatgttgaaagatgtctttaaccctaagtgtagcatttgctagtggaaactctgtaattactgtaatgtttttggtggtgactgttcatgattttttttttttaaaggtctgacagctgccctcttgatatttatgtgtttcttgctagggaacctaagattcacaacccgagcttgtaatgaggaaaagaagacaatacaaataacttgaaaaggagtatgaactggatatggtcagagagacaaatcacatgttccatgctgctttaattggaaaacaattctttcatggggttactttcccttcagctgagataattaagtctggactgacactggtgaccagctactgatgataaatagtcagttactaacaatgcagcaatcagtaatcaaaatttatatttcccaggttaccagggcacagttgaagagaaaagtgggtttgataaggctgggagataggcttcctcgtgcagtattcacatggcttcttctccacagcatctgggtgggatcattaggtctgctttatttcaaccttgtcataaaagaaaacatacctattgtctgtgtttgcattagaaatactttgcacgccccatgctggaaaagaagtttctgtatgcctccctgtaatttttaatggattaaattatattctgtaagtgggttggcatgagggtaggtttcaatgtccagttgttattggacatgaaataaacttagatatttttaaagccactccatgcagctggcacaagtaaaggtttttgaatcatggctaattatccctggctgtggctgaaggcattgaaatgaaagggattaggattgtaatatggatgccatttgtatttgtatcagcggctccgatatttgtctactcactagaatcacctggggttctactaaaatttttcacagcccaggtcacacccaagccacttaagtcaaaatctctgggtatggaacacagacatctttaatttttgaagctctctaggtgattccaatgtgcaggcaagtttggaaagcactggtctatactcagttttatgcatatttttgcataaaaatatgaaactgctgtctaggccgggtgcagtggctcatgcatgtaatcccaacactttgggagactgaggcgggtggatcacttgagcccaggagttcgagaccggcctcggcaacatgatgaaatcccgtctctacaaaaaatacaaaaattagctgggcatggtggcgcgtgcctgtagtctcagactcgggaggctgaggcaggagaatcgcttgaacccgagaggtggaggttgcagtgagcagagattgcatcactgcacttcagcctgggcagcagagcaagaccctgtctcaaaaagaaaagaaactgctgtctcccaccccagtaagaccttaaaccccaagagaaaaagcataatgtgacccacccggtgagaaaagcaacctcaaagtggtcaaaatagactcagctctgaggagaaggagaaccaaaaaaggaggaaacatgcctttgctcctttcttagtgcttagctcagtgttagttgaataaatgaataaaaagagaaaagaggaggtggtcatgtgcagctcagttcccagaaagggtactgggatgggatggaggaaactcattgaccacatccttgcacagtgggcacctctccacactgccctcctcgctctcctgatgaattctttcttttctctctagtttagtcaatctcctgtcttctctgggagcagtcattctgagatggtcgaagatgactgtctcaggggaggacactcattcagcttttaaaatgtcaggtgtcctttggggatgcttcaaaagcagcatttgggcttcctttgccataggaaatgaacaggaagaaaggccagtgaagacagagaacaagggggcaggtgcctgcccagaaatcaacgtgcagatagagaagggagaaaaaaaaaagttcccatctgcagtactggaatcccacttatggagcataaaataaaaaatatgaaggttatttgctttgagctcatctgattctttgtgttagactgcactgtggcctgcctttctgagtttgctacatttttatttgaaagctaataaattagccattcatatggcacgcaggcgggtttatagtgctgtgtaaaccaccagccaccatatacatccatctgcatcacagatcgactagaattatcactactgacaccacaatgcctataaattccctcacccgcatcctgtattccagaatatttctattggctgaccatactgcgaagagacgggatcctgggaaaaatccttttttctttctagtttagtgggaactggcaggttatcagtaggtctaagctctaggtttgcctctagagacaaagagtttaaaaaatagtaactagttttattttgttctaaaaaaacacatgcacaagaaaaatattgtcaataaaacataaaaatgtacaacataaaaagtgagtttcttacccaaatctgacctcctacacctcctccctcagagacactgttactagttgcttatatatgagaactgcaatattcacgacactttaaaaaatcagtcaatcttggcttgtatttcaagtttcattaacaaaaaacagccccctttacaatcactggggtactgaatgcactgatatttaaaaatacccaaagctatttggatcaaaatcaacaaatatttaataagtaccttcaatgtgcacaatgttgcctaaacaagccatttctaatgaggattttacacatatatgtttcatactttttttctggtgtataacaactaatctaaaattatgttagtgaaagggtagtcagtctttgttttaaatgtttttctcagaaacaaaaatgatctctttctctccctcacccctctaacttctcagcctttcacacattctctcatttgagttctgttttacgccgagacatctgggtaggtggtatgttctggccagagtactctctctcataccttccccagatggattggctcaaggatctaatattccccaaagaaataaaacatcccccaactggccattgaagaagagctgcagtgctttctattctaaacacacatgtgttgaaggatgagagacggtcatgacagagccagtgtccccacccatgacttgtctgcagagggggagacttccagtctgtagcccactgcaggatactaggctgactgcacagccccgttacccctcaaactccagccagctacatctgtatgtcttctctccagctggctggcccagctgttctggtgtcaaagaaagttatgagtcactgggaagggctttgagacaagagtagagttaaaccatctcctggggtctgtgtgtcattggcaatcgagccttagtaacaagccagtgcttgacagtcccaggaaggccacacaaccagagcttcactttgtattccacaatccacacctctgggctttgtagtgaaaaagaggtagagctgtatagatgctggatgtctccatccctagagactttctgtcattggccatgatgttcattaggttcttgccatctgtctccttgcaaatgctttttggctgtagatctatatcctatacaatctggtcaaactgggagacaatgaatgaggattggccaaagcctgaggactttcttttggtcttttgattccagggacattattacaacagagccctaggagcagctgccagcaagagtttgagtccacagcaggatccttctggaccatctgtggcttcctgctctgaacagtacttcctcactacgtgggaggaaagacttgtcagaggatccaagaaccataggcagtcaggttctccatggggaccctaaatgttgtctggtctagccctgcatcctgcgtctaaattcctggagaatattccttctgtcctagcactcatctggcctccccatccccttaggtaggctagtccatgtgtgtgttacaggggctgctagaaagttcctccctattttgagcagaaatcatctttatagtttctacccattgatcttaggtctaccctcacaactgtcctctaggtttctcttcagatatctgaaaaatgccagtctctgccccttgcatctccccttttccttgttttagtactgatttttcagaaattgtcctgatactctttttttagagcttcattcactatttaatgaatatttgttaagagtttactgtacattagactttgttcttgaatgggagggatacagtgattaataagaccaatttacccacatagagcttacattctagtggaggggaggaacagacaaaagcaagtgaaaatctcaattaggaacaaatccattgcagaaatgtagaataaagtgatgaaaaaaaaaaaaaaaagcatcaggctgctttgggggctcagggaaggcctgtctgaggaagtgacattttatgatcttggaagaaagatcattccaaggtgagagagcagaaagtccatgaggcaggaatgagagcttgtgcatttgaggaaagcaaggcacaggggctggaacagagtgggaatggaacatgatggggtcaaccagttgggtggtgccttttgtgcccagaatagagggtttaattttgttgttaatacattaagaagccactggaaggctttatggaagggaggacataacatgatctatgtttctaaaagaccattgattgctgtgtggagattaaactgaaggagggccaagtggaagtagaaagactaagtagatagcaattgtcatgaggcaggagctgaggttaggttagattaagaggattgtaggtagaacatagggaagtgggcagatttggcatgtactttggaaatagaatccatacttggatattacgtctcttggtcctcttaactcacagtgttttatgtaagtctgtattatatgtataatgtatgtgtgtgcgtgtgtgtgtgtgtgtgtgtgtgtgtgtacacacagcatcgttatagccacttatgtatagtctgcagtggtctggagacttcccaagggcagaacccatgggtgagcccatgaccccaatatccgcactgttcccgcacagtgccttgcctgcacatattagaaactcagccatttctaaagtgactgaattcgatgagtgaatgaatgagtacaggaaaattactaacaaaagctgtttctgggtttaattgaacagtcaaaggaacatcctttcaatgcctacacacttgtacgatattttctcacatctcatgttcttgcttgtacctcccaaaacactaaaaaagtaccctgtggtgtacaaaagcagtgttcctttggaatagaattactttcaaaaaattggaaaaattattgataatgactcctcaaatgtaccttttgtgtgagaatggaggaggtgcccttagctcccttacttccaaatagtggagcagtgttccagcttggggaatcttgcaagactggagctcaacacagcactttgctctcttctcattgaggattctggacgacactcaacctttctttcatgtcttagtgctgctggaaagagctgattaaatagatatgtgaagaacacatctgcctattcttgcataacattttagaatgacttttttttttttaactcttaggagagataaagactatgttaacccagtaggaaaataccgtgtttgagaaaaaagtcattctgccttagtcttttagttattcaaagtgaacgtggggaatctcctctttgaaagacgttcatgtgttgttactctccatgtgttccataggtgtgtattttccttctcattgctcagaacttgaaatccttactagtgaaagcctggatgatgcaggttgacctctctgcttcccagtaaccagggctaagtagcttctagagacgtttatccattttctgtgcctccatttcctcccaaagaaaggcaagcacacacgtgcagggatccttgtgctatgctagagtgacacgcctaggcatgcctgcagggctgggtgtgtgtctcacactcactttctctctgatttatcacctctcttttgtctgaccctcagcactttagtttggtttcttcttgtcacactcaaacttattggataatttcacttttcctccttattctggtctggcagagatggtaattaaagtgattgctgtgctattaattatgggaatggtgatttttaaatttgatttaggggttaattggtgatattcatgtgctgtcttccctcctgataattggattgcagtaattaaccttgtatccaagttatctgatattaaccatttgcctccattttatttcagacttaaaattgattacgttgttgtctgacgcccagtgtccactttgggagaaagaaaggtgagggacagccagtggagggcacctcagagaggaataggagagtctgtcttccttctctaccacccctacctgttgtccaagataacagttgtcctccccaaatattccagaaatccaaattcttaattttagtaactagttcctaaacttctggggttattcatcaaaagaaaattacagatatttgaaaattaaaggcaggtacctgtaacaaagcagagggcagatactgccagttgacaattgcttctgatgccagggattggaaaatgccgtgaccaggcatattccattggggagaaaatgattacaggctctgacatcatggaatctcctttggagacaccatcaccaagtgcacaaaaagcctgtgaagtctgtccattttctacagagagaggaaggagtgctgactcccttgtagttggccatcagatgggaagaaatgcagctcactcaggtggaggggttgctgagcctggggaggcagtcacttctgctgcttctggatgatatcacttacttaggagaggctttgggaccttgctaccaagattacatctgctctgggaacatcacttattttgtggaagtctgttcttgtcggtcctttgtctggagaggggcctggaaaactgtcattataagcccagaacataggaaatgaaaaataagtaactcagtcagcaattcctcatctctgaattattcttgcaagtatgatacgacatacacttttaaaaatatgtgaaatcagattacttttttttttaaattctgtgagaatttcacaacacactgtggaataattaagagacgttctcattttagcaaaaccagtgttgggaatttactctcaaggatttcctttctccatcactttatatcctgtttttaatctctttaggaacgaaggcatgtagtgtcccaatcttttttttttttgaaattttttagattttggaaaagtaacatgggaaacatacaccagtggagtctggagcaatttttaataatcatacctgttcataatttgcagcaaaatgcataaatattcatcctaagagggataaataaggactacaaatggtctcatgccaactcaagcttgtcacacaatgagtagaaaaaacattttggttttcagggtttgtttttgttttgtttgtaattgcagataagaaattgtgtacctatactcctgaaatgaacttggcctcatccagatctagagaaacaggggatagcaaatcgtatttttctttaaacttaaggagcctcagggcagacttcaaaaacaatgaacaccaaaatgattcctccagatgctgccaaagaacaggactgttctgtttgtgcggtgaccctgaagtcacctgtttaaggagtcaagtcatcaagtggtagagacattcaaacaaacctataatttcgtagaatttattttcattcgctctaaggaagcatattttcaggatgtttggggataattattaattccaaagataagatttcacattaaaagcaaatgaacattttatgcggtggtatcctagagttgactctggtttgggaagaggcacctagtgaatcgtcttctctccaccacaattcaaactgataaactgcctttggaaaacacctacgttattttgctaagtaaatcaagccaggctaatgagtcactttttacataaaagtaaatgagcaaagccaataaagatattagtaattttcagaaaaaaaaacctgaaatatctatcaaatttaataataggttaaaatgtgtgggtttgcagttttcactgagctcactgagacataaagcaggcttttttcggataaacgaaatgaatttccccaaaaatgtgggaaaattatagaaattcaagatataattcttccatatcatgtctgttctcgatgtgtctggacatacacagatgaacagaaaatgtactgtgtatatagatactttactgatgataagcaccagtcagcatcaatatcatgcttggttatggagcagatcctgaaatgatattatgcctctttttgtataatcagaagcttgtaatcaaatagaaactctatttttggctttcagggttctgggaaagcatcagagctcatcgaaagaggcaggaaatacaatgagggctgacacaggcagcaaacaccaaaggacctgatgccaacattttagttcaaggaaatgttttcactttcttcctgatcttgagactgtcttaccaaaaatgttgacaaacaacaagaaaacagtaaggatttatagggttaggtcaaagtttaaatcattcgtgactgatgacattgttatttggggctgttattcagagctcaacggagcgacttgcaggttgttattaattctgtaggagccaggtttgaagttgacttctactctaaaactggggaaagaacacatccctgcagccgtttaggcctgagcaatcccaggcagagtggagatcaggaaggttcaagttgtgactgggagattgtatttctattaactatactgagagtaaacagaggagaaattattagggagagtcgtcctgtcaaagttcagcaattgctttattttagtttaaatcctctaaggactttgacaaaggtatgtggaaaactctaggtgctaaaatatctctggtttgctcctttaaagtcactctccagatatctttttactggctaggaaaaatgcttggattcaggcatactattttttgcagtttgcttcatttttaataaaattacaaagaaaaagttagggagagcaacgcaaaaataacccatatactcaacacctcaagcaaataaataccaatattctgagcttatacttcagagcttcccccaccccttcttctctgtcatattcttagaaaaaatagtaatcagacacaatctttattctcagctgtaatattttaaaccaaactttcagttaaaggaaaacatccatccattacttcagacaaatgcttgaaattccttaagcaaagaatgaactagtctaatttgagtgtctacaaatccaataagcatggagttgtctgttttaacacgctgctgtcttggcctggcccttctacctgaaatgtcttagttcccacctgccccctccacagtgaacagtcatgcaaccctctaaggctttctccaaccagaagcctttgccagtcatcccaccttacatgcctctgcaacatcttcactttccaggtggtattcttggcaacagagtaataatttctttttggaagattattgttaatttgtgtatgtgttctattttggaataatgagcaaaagctatggggcccatccactgaatagtgaggtcctgggggtgatgcaaggggaggggctgtttccatctctatctgcatcagcatcttagcacagagcctcccagtagaaaacagggagttggtaagatggaaatcaggcagtggtagtaatgaacatcaggcagcaagccaaggagaagtgaatgaattttggctcccttctgaaagtagcataaggcagggaaagagctcactaagagaagtcaggagttctcagctgctgctcatctttgccacttttgagctgtcctacattcggcaagtgacctttttggacctcagttttcttaacagcaaattataggaggcatttgtttctgcatctgaagcagatgtccgagttcagcaatattgtaaacagtttacacaagtttacaagaaaaaaacaaacaaccccattaaaaagtgggtaaaggacatgaacagacacttctcaaagaagacatacatgtggccagcaacatggaagaaagctcaaaatcactgatcattagagaaatgcaaatcaaaaccacaatcagataccatctcacaccaggctattattaaaaagtaaaaaaacgacagatactagcaaggttgtggagcaaaaggaacgcttttacactgttggtgggagtgtaaattagttcaaccattctggaagacagtgtagtgattgctcaaagacagaggcagaaataccattcgacccagcaatctcgttactgggtatatacccaaaggaatataaattgttctgatataaagacacatgcacgtatatgttcagtgcagcactgctattgttcacaatagcaaagacatggaatcaacctaaatgcccatcagtgatagactagataaagaaagtggtacatatacatgatggaatactatgcagccattaaaagaaacaaggtcatgtcctttgcagggacatggatggagctggaggccattatccttagcaaactaacacaagaacagaaaaccaaataccgcatgttcttacttacaagtgggagctaaatgatgagaacaaatggacacacggggaagaacagcacacactcaggcctgtcagagggcagggcatggaaggagggagagcatcgggaagaatagctcgtggatgctgggcttaatacttgggcgatgggatgacctgtgccgcaaaccaccatgacacacgcttacctatgtaacaaacctgagcatcctgcccatgtatccctgaacttaaaataaaagttggaaattaaaaaaaaaaaaaaagaaaatcaagaggaaggtttgggaatgaaggtaatgattacagtctggggacatactgtgtgagttttacaagtaagccatacatgtaagtagagttttccagaggaattgtacaaaatcaggtctggaattctaaaactaaaggtttagattaagaggtaaaaattagctgccttgccgggtacggtggctcacacctgtactcctagcactttgggaggctgaggcgggcagatcacctgaggttgggagtttgagaccagcctgaccaacatggagaaaccccgtctctactaaaaatacaaaattagctgagcatggtgatgtatgcctataatcccagctactcaggaggctggagcaggagaatcacttgaacctgggaggcagaggttgtggtgagccgagatcgcgccattacactccaggctggacaacaagagcgaaactccgtcgcgggggaaaaaaaaaaagatagctgcctttataatggatagccccatttaccctgatgtgattattatgcattgcatgtctgtatcaaaacatctcatgtaccccgtaaatatatacacctaccttgtacccacaaaaagtaaaaataaaattcaaaacaaagtagccacctttaagccaacaacaaacaaacaaagaacgtttacaaagatggtgatggcaaaaagctagagcataccacaggtaagcctggttgagactgttgcagacttttgagataaagacagagtttgccacaatactttcaggcctactaaggtcgtgactatagcagcagagtcccagtgggccatgagactgtatctgaaacatccaagtaaagtgcaataaatgtgcaataaacatccaagtaaactgcattggctcagggctgtgtgtttggggtgggggtggtgggtagagagaaagaaaacgaacataacagaatcatctgaaagaaaagacttgccttctccctcaaaagataatacgtatacaaccaacctttattttttgaaaagatatttttttctagaagtacttacgaattcagtttttctacgtttttgtgatagtggtttcagatctaaaatggaacatctattacacccagtcgatatttattattatcctccattgaatgccatcatcactctccaaaatgtgttgaagttaggtctgtggcatttccctttcctccaaaatgggtgcttttatgtctctcttaatggctgagagaaggaggaaagaaagaccagatgctttattaagaggctggagctatttttctcatttgcccgaaccttatatcttaatgcaaatatcactgaacaggcggccctcgtggttcctgcaaactgggtacaataaaggtttcaaacaggatcaatgggcccaggttgtttctaattacgatgggatgtgttctttgacccagctctgcatcttgtggacagcagcaccctcttaatgctgcggtccttgaaacagagctgtccaggtcagtgaaggatacctactatttaaacactcattacttctttaaattttcctctggtgcaagaatgatcagcagttccagcctctgtgaagcaggtctccagctggatattcagcaaaaacacctgctttcccatctctctctggacagaggttccttactcacttgagatatgtccacatctgtttatcctatcagctactgaagcaggcaacttctttcttaccctttgcaaatgacactgttctctatgatgtgttgatgttaaaacatcacggttgagggaggctgcaagcaggcaagtggctccacttaacacagtggtgttcatgagagaatcaatttctcctaaaactggttgagaagcatttgcatctttctatcaccttaaggctgcaatcacagggccataaagtggaatgaggctttgcatgcctacatgtttgggagcaactgtgtactccctttatagatttttatcaccgaagccattagggactttcagccacttcgtccacataagcatagatgcatcagcctatatatgaacttaagtgcagtttccttttatgccatcacctttctctttccaacctttcttctgttcctttttctttaatgccttgggaaggacataaactttggcattatacagacctggctttgagttttgtctttaccctttgactactgtgctgtaaatatagttggccctctctatccgtgggttccacagcagtggattcaaccaaccgctgatagaaatttttttttaaaaaattgcatctgtactggacatctacagacttctttttcttgttgcttttccctaagcaatacagtgaaacaatgatttacatagcatttacattgtattatgtattataaataatctagagatgatttaagtatacaggaggatgtgtataggttacatacaaaaactatatcattttattcaagggacttgagcatccccagattttggaatctttgggaggtcctgggaccaatccctcacagatactgaaggacgactgtatttactatgtgctgcctagacatgttacttaacctccctgaattgcagtttactcttgtgtttacaacacagataataaggcctgtctctctgggttgctgtgctgtttcaataaagtaataggcatatgtaccttgcacacagaagatactcagtagacccccacttccacccagtcctttctttattttccacatcattatatttctttgcattagtgtgagtgccatgatttacattttttaaaaaccacaccatgtttgtgtgactcccaagacaaactttccagcctctccaagtgaccacctccagagataagaagcttagtgacttgaagtgggtgggggagagagaaggagggagggagagaaggagacttctctcactgaagcagtagaacactagaagctaatctaggacctccccgagaattttgtaaggagtccaagaaaagctattaaaaagtaatttttagtgtctcagctgaagaataaataaacatttattgaggactatggagagtctccaagacactattttacccatatgaagaaggggaaactgaggctcatagagcttaagcatcttgctagaggtcccagctagtaagggggcagagggtttcaaagcccaggtttcaccccctgctcttttctgctctcctatgttattgcaatagtttgatgtcacgtaggagtttttaaatcaatttcaattcacttttggaggcagtcacactgtacagacaaagatgatgaggtccaaaaatttgagttaataaaaatgaaaattttagatttagtgtaaaactcaactgaagtctaaataagattacatggtaacaacagtgttctctgtggtcagattagaactgcttatctacttgaactgggtcctgaagttgagactaggcagtatagcatgctgggatttctttgctctcgcttgatgaacttttcaccacttttcatgatgtgcctattgcagtccagtgagagctacatggaagagagttcgttctacccctcatgcttgccacaaacagtaccacacattgacacgctgattatccctagagtttccaaaccacatgctgcttaggagcaaccaggaaagagtgtagagggaaaaatgagccctgttccccagtttgttttggaaaggtcacttgccccactgcatagaactttctctgcctgccctctgtggtgatctcagagagtggctgacacaacaacaagagcccaactacatttccagtgcctttaggacaaagaggaaagctgtgtggaggtccagcacctcaccccacctcagcctgggtccccttattccccctgccgcccctacctcatctctccaggtgatgttcctggctttggaatgtgttacatgacccagaggcaggccactccctgtaccatccttcctaatcgcatgctctctctctctctctcacacacacagagacacccttcttcactggggcagaatcccttagaacagtaccatcacagagccggaggaatcttatagactattacatttcatatcctttcattttacaggtgaggagactaggagctagtgaggctgactaacttgcccaaggtcaacgccattaatgtgctcttccctctgttaatgacagcatgaattgttggttatctttaaaacttcatatgatattagaaaatgagctttttaaaagaattactgaaacatggtagtaagtgactttgctcagggaaaaatagtgccactattatcatttcctttttatttcaagcccacacttggagttgttaaaagcattttgtatttgcaaatccagatatattatttttcacgtcactatcacttattattaaaatgttccttgtgtgccaacattctggaagatgctgccatgtctaccaaatcagacacaaattgtattcatacagtcaagtcctccatgcaacttgatgcaccaagcatttatgcaccgtttgctgcaaccggacatgtagacagttggtggggcagcccagccgggtctctaaaacaagcagtgttcattaatttgtgtgtatagacagtgggttccacatggtccacttgctaaggctgctcagccacttgcagatgatggtcaagaggaacagaatacctcacgcagcaacgttgatgtcctgtacctgggtagtataaaggttccctcagaaccttcaagggcaggcaggtgaggttaatgggtaaggaaggcctcctaagagagtgggaaggagtgggaatgtttccgtctggagagagccctatttggggcagccaatgctcaactccagagttttgtcaggtggggtcttggactagcaaagccaaacctctgattttttttaagaagtcaaaaatctggagtttgttaaatctcctatttttccctcaatattgctaatttagttgttttcttctctctgagtcagcttctgccaggtactacgagtttgtgagcccccgtagaattttccagggcaggatttggaggaatagttgggcagaggattagaactagtgtcaggggtgagcctgcgtggtactctggctgggtccacttgtcatggcttcccagtcctcgtggcttgttaaactgactcattagaagtaagatgtggcaattgatggactcattctctgactttgtaatcatttccagctccgctgccatcccttttgcttcatgcttggctgacacaatgacccgctgtacatcaagggtgtgggaggtaagggtgcgcataaatggaagctctagtaattgaaaagaatttattatttttaaaaaatttatcagcgtgaatgcattcacacggttttcagacagtccttttggtctcctttgtttcgtcttcaatctggagtacctgaaagctggtttcctgcccaattagcattctgcatggttcatttggctcatggcaaccaataatcacaacaccatttgtacatcacagttctgtgatccaatttgggcttaaaaactgtagggaaaaattattgtgaaaaaaaatttgggtgtagaaagtcaatacaaattagtttcagatgaacctaaatagacctgacaaattcaccaagcagatgcctattaaaatgaagaatgttcttaaggttttctgtgaatttgggggtttggggcaaattaggattataactttgtagtaatggtatgttttacaaaggccatttcacttcaggctaaggagagtgaaaggctgagacaagtagatggaaaattcagatataataggcttacttatgaagtaaatgttttcatttagaatccttatattgacagtcttcctttatctaattttctgaatagctgcttaagtctaagttatatttagcctatataagcacagtcacagacagggaaatcgacaaatgtttgcagatacctataaatatgctacatgtgggtagcacttttcaaagttttgaaagtgacttaaacagcctcttaaattgcagcaacactgctcactcaaggtttataaactcagtgttaagttctggtttttgttctcctgggctggtgcaagtctgtattgcgtcatcttaggaatcctgagactcaagcctgtgttctttggatgagaaatgacaatgttatggaattgggatccctccgcaaagtaatcatttcaacaagaaaatttattgtctacatatttacaagggttagggcccaaaattgagtagaaagggaataatacatcaaaacttcaactgaagaaaattttaaagtgttcatgtggactgaccaagattaaccaatacttccagagcactttcacccgtatgatgtacatgttaactacctgatgatataatgatagaaagacatataaaacagctatttttcctggcagagagccctgctgtaaacctggagatacttaaatgatgctggctgcagggatagccagaatagccactgacttgcataacagatttcttctgcatgcattgctcttcctgccagcttctggggttgagaattttgcatttgacacatgcaatcttaagatggaaaaaattaaaattgggggatataataaagtagcaggacattgtcttgttagcttataggacatttgtacaaagatgaatgcagttgttgaaggatggagactcgtttgtcatgtcaagaaaaattaagccttaaaagcatacatacatctctaaacatttctaaaggaatgagaattagccttttgagtttcctttctttcattatatgctgcaaattctctgaggcaatatgcttctttataatactattcttgagctcctggtaaaagttgccagttctccctgacccctccccctccccctcccgccagatgctttctctcctaaaatctaacagctgactggtgtcttgtttatgttttacttttgttatttatttctgccctttaatgctgtactgaacaggagccatgagaagcaaatcagggcacttcagagcttctttcctttgagttcagattttctaggataggaagaactggcaaataaatgaatgagtagactcttgcttttcacctgtctaataaatacatgtttatgtctcttcataatggttcacccttatgaacaagtaatcatttaaagtttaattttaatgtacacatcagagatggagacatggaattgtttaggcttttctctcaatctgtctccctctttgattttcaagataaagcaaattaattaatgtgcacttttcaattgaagaaatgattaagacccagctgtgtgtgtgaaattataagttacagtgcaacacttgggactgattaatactttcttggcatgaagaaaagagacataggtatataatcaaaatggtgttccaaaaagcgtaagttagcagtttgccaaattaactttcaaagacatctaggttactaagtttgacatttctacacacaaatcttaaatgattgatggattactgtaaaatagctttgttcaaaaaagataatctttggcaggtacttcaaagagtttactgctctggaaagatgaaaagaaatcctcattttacattaattttcatgatagagcaatgcttatttgcaatatgcctgagaattaagtgatatttactgtattatgagtctttttttttttttcactgtatccagcagtcccacatgggattgtttttatttccaagatttaggagaatttttctgcacataaagagcttcgtcaagaaaatacagatgggtagaacagtatatctgacatttttattcactacgatttcactgcaaggaagtattgagaccaaaatatatagagatatgactttttaaatcaacaataccgtttcagaatgcagtttcagattctccttgtagtaatcttcagagtgtgaaaggatctgcctacttctctttatagattgtgtgattttatttatttatgcctaagtcactgtagaatgacataagtcaggggtgaatatctcaattaagaagtcaagcaggtaatggaaattagtaaacaggatgagttatagatgtgtgtgtgtgtgtgtgtgtgtgtgcgcgtgcgtgtgtctgtgtacctgtgtgttggaagtggtgccaaagggaaactgtcatttaggtcagtatggcaggtattttgatttttacaaagaagctgaaaaatctagattaatatcagaaatctcctatttttcaatattggcagtcacctcaaatttctgagtgattttgaaggcagagtttcatgactgtgaaatagccatctataaaagcctaaagatggctcaggataaaggaactaaagctctttgttccatattggagaaactttgcaaaagggctcagatgcgtggggaaggaggtagcagtaggtaacgggtacaagttccaaacacaaaaatcaacgaatttaccatgtagaagatgtaaagcagaagcctttttttctctcgaatttatctttcagggtatttcattttatggcattgaacaaagctgacttggaaaaaaatctgttctttactttttggcagggtgaagtagagaaataaagtctccccgctgaactactatgaggtcagaagccttgctgctatatttcacactgctacactttgctggggctggtttcccagaagattctgagccaatcagtatttcgcatggcaactgtaagtacccatggtctcactcagtgtctccctttgagaacattttagcctgaatcagcctagcaaaaaataaaactgaaaaatgaaatagaataggtgacttattagtcctctgtatgtggcaaaggtggctaattcaagtctagtcaaattgataggatgatttttctataactccatcagatgttgttgtggggacacgtgtgaggatttgaaacgcccctcgtaaccctgatgaagtctcagctactacatcgaggctgccgtgttcatgccttaaaatcagctctgtgggagaatatcgctatgatctgggtattggcagtattactcgcttttatatataattcatatatccggactgttgcaaaatatgaacaaaaagtaatgaccattttggagtacttcagagaaaaattttttttggacttagaagttacatagttaatagactttggtaaagagaaattaatttatagaggacccattttaactgtttataactttcctttggtctctgcttcattgtcaggagtagatactaacatgattaagaattcagctgtctcctcaaaagaggagagtcctgcctatgtgttggatggaacattcaatttaccacttttttttcatgcccttcaaaaggcttaagtattttattacagtaaaaatgtaagagagcatttttttcctaaatatctcttttcatagtaatgaccccaaaacaaacactgagtgagccatacaaaggtgtctaacattaatatgcaatactaaggagatccaaatatgcccagtgttcagctgttctttctgggttggaagaaaatgaggtagcaaaactgacacacaaaacaattagagtccagagtcaaagggcattattaagaccaaatgtgtagttcaagttcatcattcctgaaatagcagagtccacctaactcaaggttccaaacttaataaacatttatttatttccatttgaggtaagttttctgtcttggatgcccgagtatagaagggactccagggcagggcgcggtggcttacgcctgtaatcccagcactttgggaggccgaggtgggcggatcatgaggtcagaggatggagaccatcctggccaacatggtgaaaactgtctctactaaaatacaaaagaaaaaaaaatcagctgggcatggtggtgcatgcctgtagttccagctacaggaggctgaggcagcggaataccttgaactggggaggcggagagtgtagtaagccgagatcacaccactgcactccagccttatgacagagcgagactctgtctcaaaaaaaaaaaaagaagggactccagcccaaatggactactgtaagccacccttcagtgatcactcaaatccatgatcgtagagacatttgagttgttttagcaatctccttgatgaatgggtacatgaaatttcaaagcagtggaagggaaagcacaagattgtcttataccaagctcccttgtaaataaaatatagtaaggctcctgataagatacccactgtgagtaatggtcagatactacaagggtgtaaagtgagggtcgaagcataaatctgtgaatggttttctagtcatcatttacacccccacccctctccagaaaacaagtgccttttaaatgtggctcatctttctttcctcctgagtttgtctggaggctcgccagtgctctggagatcgtaggtgtaaaggcagagatgttgagatgtaggtatttttaaaggccagatctcaatacagattggccactctcagccaaagagaagtgtaggaaaagagaaatatgctcattgactcaccaagtcagggaaaatttcagatcacctgactggctacactcagtttgaccctgtcctgtcaaagcccacatctctgtgaaattgttagccaattgcttaactcaagggtgaacttcccacagttcctagaatgccaaccaacctctcaggggctgccttcaatagtggattattccaactggacgcctgtggagactgtatttttcttctggctcctggacaagggctctcgcctccagaccacattgcatttgtggtgattgatgggaaggctgctttgaaatagttttgtcccgagacaagatctttggcagactgccccctcaggcttagctctacagaagatgaaaagaaaactgtggaagaaaagagcaccttcatgcaaagggttcactagcgagttgagccctgagaaagagagacaaatcaaaaattgtgacacttagaaatataaatccaggcttataattatctagaaatgaaagtgtaacttgatgaaccttaaggagcactcttctatcatatttcctaaaataacagactcatatggaaatggaaaatggtggcatggtctgacttaaacacgggtttcttttgtgacctgtctccctcccctccctaccctgtcaattcctggcttgatttgcttttcctttcttgccccatctcctcttttcacagatacaaaacagtatccggtgtttgtgggccacaagccaggacggaacaccacacagaggcacaggctggacatccagatgattatgatcatgaacggaaccctctacattgctgctaggtaaggggccttttccccatgtctgccttgagagtgtccaaaagcccaaggtcctaaatttaccagctatgcattatttttaagatcttgaggtttctaaatagagtgttatttaacttaaagcctcctttaacttatcaagcaatcattatttcaaaattgtctgtgtctgtttaaccctatgtggatttaaatagaaataatagcatatttgggcacttacactcaaataatccactgtttatcttgaacatatatgcaaatatttattcaagcacccattagaatgctctgctccttaatactctgtttgtttgtttgagatggagttttcgttctttgttgcccaggctggagtgcagtggtgcaatctcagctcactgaagcctccctctcctgggttcaagcaattctcttgcctcagcctcccaagtagctgttgtaacaggcatgcaccaccacgcctggctaatttggtatttttagtagagacagggtttcactatgttggtcaggctggtcttgaactcctgacctcaggtgattcacccacctcggcctcccaaagtgctgggattacaggcatgaaccacttcatctggcctaatacttatttgttaaattaaggtgaatgtgtaaacatgtattatatagtgtgaatgtaggtgtgtgcattaaacctatttgtatttttgcagttaacatatatatcattgataatctatatcatcactttgaaagaacggcaatgacaaccaaagaaagcattatatatatttcagaaggtttttatttggttttagtaaaaaaaaaatactcatccattggggaaatgttatttagacagacaggctgatgtcttaaggctgaatggcatggtaagaatacggctcaaacagggatcacataaatttaggcttttgttataattctgctcttaatttagccggaccacaagttgtctggccataagtatcctctgccaaatgagatgttgtatttgattaccttaatgaagtccctaaggagtccaacaatatatgatcctccattttgggagtgtgtagctattcaaaataattccaaatgaacagcaacatggagcactatcttgtagtgtcccctgtggtctttcctggctctacactgtttaatcatttcacactggggagaagaaatgaagattatgcttttttttgagacagggtttcactcccatcgtccaggctggagtgcagtggcgcgatctcagctcactgcaacctcctcccccgcaccagggttaaagcaattctcctgcctcagcctcctgagtagctgggactacaggtgcccgccaccacgcccagctaatttttgtatttttagtagagatggggttccaccatgttagccaggctggtctcaaactcctgaccttcaagtggtccacccgcctcgacctctcaaagtgccggaattacaggtgtgagccaccatgcccggtctagaattggagatcgtttctatctggcataaggaaagaacaagtaaataacagtggttgattcttctaaagcacttagatgttctgaggtgataagctgtgcaacataaagttaaaaaaaaaaggggctagactaaaacatcctgaaactgcccctaacttggctacaggaagcaatgtccaaatactttcctaaagttttactttacaaatacttatacagtatatacaactagtatgctctgcacatacaattcacaaacatagctgtagattctttatgaatgtcaattcatccaatcctggaaacaaccctacaagaaggagctattattattcccatgtcttataggaggaatccaagggacagataggtgaaatgatggggccaaaatgacagaggcaggatttgaaccaggatggtctcgctctagagtccatgctgtcattccctgtactatgctgcatactgaggaatagagctggtactgtttgtcctgagaatacccttgtaatagctgttgcccaagaacatggtcattatgagtagccattataaagcatttccataagatgctcagtagtcacctctctgatagaataccagctccttcttagatgtcatttttattttcctaaacgtaatagggttggaaaatgacatactcaattatctaagggctgatcaaaacaaatgataaaacattgaatctgtgagaaataggttgacttaagaatctcttgtgaattgttcactttccagttgagtttccgggggaaaaaatggtataacagactgcccttgtactcgatgatttagcagggcgtggaccataggtcccagggctacatgagtgttaggagcaaggtactatgcagacttaaaagtgaccattagtctagctcattaaaaccaagacagttttattctaactcctcaccccaaggaaggaaaggaaaagaaggataaaaagaagaaacacactaatatttgaaactatcaaataagctcatctttactaaaggtcaagtttgtatcactgtagcattgacatgtttgttttcacaccatacgcagccacttcctctcaacagacaaccttagaaaaattcttaaaggagttccatgcccaccatatttaggacctcttctctccttttaattttacactttatttttacacttccaactttaattcactttaattttacacttctcaacattgctctgagagatctaggtttctaggcagcaagtaacacgatttaaagctaaatccctccccgcaccccaccccccggccaacccccgcccgcccaggttcaagccatggcaacacaattcagtggtgcttgctggagggggaagaggaagtcctaggattaagtcagtttatgttcaaataacttaattcaggaagaacagcatatgagacctgggatgtacactaagatggttgggaatgacccctgaccctggtctgtggtttaccataaagcaccatttttatttgctagggccatgtgagcttttggatattgaaaaagattgtcattgtccaaaagaagatttcattcacagaattctgtgtttaaaaggcttcccagttcttctagacaattgctgtcagcaatcgcaagccaagtcccatccagaacccgggggactgagtgagggttggtggcaagaacccctttcaattctgctttattattatccactttgtaaattcctcttcttttttaatctctaaactgctaattaacataaacaggccatgccaaaagggggcaatctgagagctttctgaggagctgccaatgcatattaatcagttgttcatttacaattcatatgttcagctcaaacttaagttctgaggggaggcaggcaaggaaaagcctcgagtcatctcaaacctgatagcaaagtaataggcaattccattccaataatgagtctgaccacagcaccaccaataaagtcaagcaagtaataaacaaatgcaataaaactgccttgaaattaaagggcagggtgattctggcagcctactgaagtttgaagaaacttgcctattcagcaatttacaaaacaggcccctactcctccaccccttaccacgcccttccacccccttccaccccctccccccatgcacactcacagtagctggcaagggaattttctaagccaactgcccttcccgctcgttttatattcacgtgagtcggcctgttatctttctctgttgtatttttcctaaaacaaaaagcaaacagatttcccatgaactgaaaaaaattatatatatgtatatgtgaatcctgcaaataattcctttcttatcacctccccgctctttcttttaagtaacgaggggacttaaaagtctgtatgggagacgaggtcctggtttaaagctgtgggtaatttttcagccccaggacttcctgcattttagagaaagtcaatgttatttcaagggaaaatgagctgttttgctttccctcagtagccccccatctcctctgttgagtgtagttcttttcttttctttcttacaaattccagacaaaaacgcccttgtactcagctcacacagaaggggatgtttaaatatagccccacacctgagctgctgattctctttctccccttccaaggctagattggcagcaaattgtaaagacaacccaattctcagcaaaacaggaaggtgaacagaagcaagaaatgtaaactttagcttaagtacattttagactttaattgaccatcattatgagggaaaagagtggcttctggaaataattttacctttgtcgtcatccatcctgtcgatcaaatagtcacagttaagatggaaatatattttcaaaagagagagggcgatggagatcattttttttgttagccctcttgatgaacagatgtggcatgttgaataccaagtatttggtacgtgtatttgaagataatgaaagggcacacgaatccatctgtgttctagtctttgggccaatttaactttcagagccctcccttctgagctacatatatgcagatgctatagttctagtgtcagagagaagagctaatacaggaaagttttcataaacggtgttccttggagcacaatgccatgatttatcagaaggtgctaaatgggatccggagacatctcttgaaggctgcgctcttttcttcttgcatgtggatatcatgaacatggatatgggcttatctgccctgataagacataactcattaagcagaaaatgaactgttttgactctgtgtttgaccttgtattaatttttctttgcctatagggaccatatttatactgttgatatagacacatcacacacggaagaaatttattgtagcaaagtaagttgttttaaaactatatttgtaaaatgaaggacctttggatagttcttgaacagaatatgtattttaagtgcattaagatgatgtagctaatcataatttagagatgccaacatgcattttgtgaaatcctaattagggaataggttaggatttgatacatgttcagaaacagttatgtacttcatattttattcatcaaatatatgtgtacatatacattttgaagttttacataatttctacatttcttttataaaaatattgcctcatttatccaggaaaacatcagttttcataagtaaaattttgttccacaaatgtattctacaaaggtttcaatgttatatttccatgtcttgcagtattaagtttgatttgactgctgtggttcaggaacttgatcgttacccatttcagacagacataaagtataacctaagctttcctcataactccacatggggatattttagttaataaaacctgtgccataggagtagaagatcccttcagtccattaatctatgtgaaggagtataacctgaattaaatctttgtccacctagagtgaatgtcctctttatgtttaagaaaatgacttctgtattttaagaaaaaagccttctttataaaaattgatttatcaactgaaaggaaagggcaaggacatatattttatccaaatgagcataatttggcaaattaatttggatagtttatgaaaaatttccacactcttgtttattcttctttcttttctccttcatctttatctcaaacagaagaagaccattttgtggtttaatgaatagataggagttcaaaattaaacggacgttttcatctggaatcttttgttgttacggtgaattaatcatggagaaagggtgcagaaagctttcaataaatatatgttcagcctttagtctccccaagggaactcttacttctaaaatcaaacgcaacaacctctgggctctaattgatttctttcttgatccctgcagaaactgacatggaaatctagacaggccgatgtagacacatgcagaatgaagggaaaacataaggtaggcaattttcatttctcctgcagctgccactttgggttaagtttttgactgttatctccagccatagaccgtgatgtagaatggattgtgctttttcctttttccctcagtaattgcttttttcatcaacttactgaaggctttaatttgcaaaaatagtttgcttttaatgtgatgaaacattacaacagctgctaggcctgcatcatgaactacttaggcgcacacaggattatggacacaaagccggctgcccagagtcttgtcttctgagtgtacgccgatgcccacctccgcagtccaaggcccacagggagtctgtggaagagctcataaaaggctgccgcagacatgcagggttttgtgcctgtggtcatataacaacataaaaacacacttcaaccagcagctttgtacatcagggaacgctggagcatctggcattaaaattaatatgatgggaggttggcatttccaggcttgccttccttttgtgacataaaataaacacacaatcttccattctatgctttgtttttatttacgttgaaagagtaatcgttgatgtcggcatcatcttgtggttaacatcaggaagaacttgaacttttaatgggagaagtcctcagccacctccactttaaccttactgtcagccaaccatggcatacagtgaagaatcagtttctgtactgaatggacatgatacaaaacagtttgaattatttttcaggatgagtgccacaactttattaaagttcttctaaagaaaaacgatgatgcattgtttgtctgtggaactaatgccttcaacccttcctgcagaaactataaggtaaatgctatttgtcggttggaaccacactgccaggaggcatttcataatttactgtgattgtacctgcagcaacctaagaggggtaattcaacaccacctgagttcctctcacttgttcaacttaatgtattgctccacatgagtgatcctaagcaggcttctaagcttcctgtttgttcaggattgattgacacatctttaaagagcctgcctagcaaagttagtttctgtaagacccttttctctattgttcagaagactgacatacttaccacgtacaccatgtggatttcctctattttttttctccctcccaccccactatctaacctctgagcacaaaagcacacttatatggtgagtgatttctattctaaaaggtatctcaaaagcacggcatttgaaaccgtagactttcctacaagaacacaggaatttaattccattgagcactcagctttcttgaccacggccttgcttactttggctttatgcaagggctggaaaaagccctcttaaagagttagtaaatctagctggttttgatgcagctaacagaggtgctgatgaaggagcagggacctcgccaggcctggaagcagaggtggcagtgatctgaggtcttggctgcaccactgttagccttccttgtacatctttctgccagcctttgtctcaggaaacatgtactgtgtttctactgtggcccatcgctgaggttgtaaagacagacaggaggcctcaacccttagggaagccaggcagggagaagaaaacaacaatttcatggggttgctgccatggtgacatcatgcaatggattatggaagcacaacacaaaagttcctgccatgcatgaggtgaggagtctgggaaagcttcagaggatgaccccgtgtcttcaaactttcctacctgttgttcccacatcgggaacacaaataccaccgcccttaagaaacacaggctctacaagggcagggatcacatctgtgattctccagaacctaacatagtgcctcccaaacaggcgtttaattaatttttgtaaagcactgaatgaggcaatgcctaacctttgtcttaaagggtaaggagaagttagccaaatgaaggaagaaaagcattccagttagcagggaacagcatgaacaaaggcatggagtaagaaatggcctattgagcttgagaaatctcatttgattctgaattgtgtgactgtgaaatgacaagtgttaacagaaaaaactggagatgtagatagccccagggatgaagggaagagaatagataaaaccaaaccggtaggatttaataatagataagcacaggataaagagagagagaggtgagtcaagaatgactgctaggccatctcttggcgagtagatggatggggctgccaccaattcagacaggaaataaaggaagagttgtgagattggggttgggggttgggggagtgtgaaggtatgggctccattttgcacagtatgagaatgccaagcactgtgaacggcactgcctataggacatgaatagagctatctagcaagaagatggatcagtaagctttggtttagagacagatgtggagagaaatatagatttgggtttcatcatcataaagtgaaaccctaggagtgggaagaatgagaaaagcaatgataggctggaatccgcaccaacaagctcaccagaaaaaccccctgtctttttttggcatgtacagtgaagggagggtctgtttgaccctcatacttatcttccatcttacacttggaaatgggcaccaacagggccaggattagggtggagcaagtgaggcatgtggctcaggcacaaaatagaagggttcaccaaaaaattccgtaattaagatgttagatttttaatgcaatattttttaaaaatcaaaattaattaatacatacaggtctgtcataaaccaaagatcaagtttttaagtataaagacaagattcatcagtttataatagaggtagccagtctagcccagcatttactctagctagtgacagcatacagataaggtttcaactttaatttaccacttaatattccatccctgtttgtcattgtttaggactcattaagattaatgcttctaacaaatcccaaggaattccctagatggaaagctatcttttatgacaaagtacaggttttcttggcacagtaatatacaggccatgaatggtctggcttattcttcctgtacatgttccatttcccatgattctacacttataataatgccgtcacctcttgcttgttcttgccacacctgctgagacatgctccagtagcccaggcctctcagaagccacagatgggatgttgctcatgctcagttcccaacaatatgcctagcgctgtgaatggtagtaagaacccttggcattgctcagaaaagtgtatttttagactcaggggacagtgtgacattgctgatgatatgggacataatgtatttggctgcagggaaaacgacagcttctgtcttaagtgctttttatcaacagatcaggacaaaggttcaaagtgaaaacaatgaccagtcttccagtgaaaaacccaagtcttatcatagcacacaagcatcaagttgattagagtgacatgaagcaagagagtgacaaattttcagtatctgcctctctaccatgccctgatctatattaatttttataacacaagtaagctgaatgtgttagaaaggttatagccccaaattagattatcaagattatctaggggagagctttgaaggctacccactataaatctaaaagtgcactccctgcctttttcctcctattctctaaaccttttgaacttctgcaaaaatcaggctgggtctttgtataattatctgtacctgatagctgtttaacttcccaggagctgctgctgtgaagtctaagatttgatgactgcttcaagggttagttttcacttcttggaaagaggaagtcaccatggcttttgcctctggacctttccaacctcacaaaccgaaacatttgtacttcactacttcttgcctttgaccagctataggtatagccactttttttttttttttaggttagttacattataaagaaaaccatataccccttgtctattgtttcctccttgctaggattagagcgtgcacagcttaggataagggcatttccgttgcatcactgtgtgctaagcatcatttttgaatacatgccagacccacagaccacagagtctgtcagagttcaacaaaaagctcttggttggtataaaatatctgaaaaggactttcataaaaaaatgtgctgggtggaagagtacactgcttgaaagaatgtctgatttgaccatctttcccctaaaaatatgtttttaacacagctattttatgtgattctcaactacagtttaaaagtggcttcaacagggtccatctcaaagtgattacagattacaaaaggcctgtcacatcctggaaattatttctgagggtttagggcaaaagaaaaggttgttgtttgtaattaagtctgattatttcatttagatggatacattggaaccattcggggatgaattcagcggaatggccagatgcccatatgatgccaaacatgccaacgttgcactgtttgcaggtaagcgacctgatttctcctcgttgcacttgcttttgcttgtttcatcctgtcactgtgaatctgctctagaggattcgtggagtcacagttgtgctttgattctctggtgaatactgtaattaagaatgcctttctgtttgaaattagtatgaaaattgtacttttgcaagtctttgcttcacttacccatgtgtttgtgccttcaggaaaggataacagcatagcgctgaacatgtgatggatcagttagggaatgtttgggctcaaataatagaaaatcccacctcaaaccaccaatgtaaaaaaaaaaaattaaatttaaaatcccctactgatgtgcctttattgtttaaggtaggatggactttgggattggctaggttcaacaactcaacagtgtcatccgggaggcagctccttttcattcccatgctctatgtcgacctcatgatgagactggtggttctcacagtcagaggatgactgccagccccaattagggctacatgtcttcctgtccacatatagaaaagaaagggaaagaaacaaaaggaagcctctggaagctctctcagagcaatgaggccacatacccccaagcttccaacaaacatcttctcaaatatcattgacctgattaggttacacacccatctctgaccaaaagactatggtgggtgaggggagggtgctaattgcttaggctgacctctactccccaacactactccttctttccactgcaaaagatataaagaaatagcaaacagaccatcattttcagatgtagtgggatttttgtgtatgagtttgtgtgctttaattagaaatttatttaggaattcattaccagctgtgtatgtggaggtgggtgtaagagaagtgttggtataatagtgattcttatagcttgtaataaagcagttagctataatttccatcacaacagctaaaaactggcacatactagctggatgagggaccctagggctttgattatgaaacaagattagttcctggcttcctgaacctctccctcagtgtcattcatttgtgggcctggatctgcagtgatagattgtcaagttaagaagggcaggttcctcgggttctccccctaaatgagagcacaggattactgagaagcagttccgtcaagaatacaaagtcttgtagacctatttgtaaggtatgagcaaggctagtggaaagagtacttgagcatactcccaagtacatgactactgctggaggtcctcactgacacttggaacctgcattagttggggccttggagaatgtgggctgcaggggagaatttaaatttaactgtagggccaggagtggtagctctcacctgtaatcccagcactgtaggaggccaaggcggggctataggaatatagaatacatattctatagtcttatataaagaatgtctttatgacctggggctcaaaatccataagaaaagttatgattcgtagatattttttgggccaatttaaaggtttgctctctgcagtttaaatctaccaaaacttattgatatatagctgttaatattgcagatattaagacatctctaaattgaacctggacaaattttaattattttaagaccaaagacagacatcgagatctttgtttaaatatatttggatatgagtttttttaaaacaaacaaaacaataaaccattatgtttacactacatataaaagagcttgaacagtactatgttgtatgtaagtcactttgacatacaactaatgaatatctgcaatccactaaaagtgaatcacggaagtaatttttttattttgaatataattcttgtttccatgtaatcaacatagattttgctattctagaacaccccttttgattatttgttggcagagtgtttgctgagccaggaaggaaccaaaaaggtctagagactaatcttcagtctgctttattctcttatgcctgggatctaccctcaatcgtatctcccccaaagcatgaattactaaagaaagacctatttgaactcagcgtaaccccttcccctttcttcttggctttagccaagctgtgtttcggaatgtttttagtttgtgactttggagatgcggaagcaaatacctgttattgaaaccagattgcgagggtttagtgaactgtcaagcctgaggtcaagaggagctgttactctcaggacagtagcaatttagtcagcccgtttttgcttatgaaccctctctcttcaacttctctcacctgatcaggctgaggacttctttacttatgcatgtgcctaaaatttctggggacacaatcagcatctatctttccctgggctctcacctaatccagtttaccatggtgtggtggcagtagtagtgtccaaggatccttggccttgaggtttcagtcaaggtccagctaatcaagtgaagcagacatctttcatctaccctgttccctgagctgctgctgctgctgccgcttaaaaaaaattgccatgcaattttaaaatgaaaaatgtttcatctctcatgatcccaatttaaaatggttaggaatgtgggccaagagttttcccagcgactcttggatttttcccagttgtgctatctcatttgcctgatgttggaaagcaatctaggggatgtctttattattcctccacccccactgacttgctcccaccctgttcacctcttttctttttcttctaagatggaaaactatactcagccacagtgactgacttccttgccattgacgcagtcatttaccggagtcttggagaaagccctaccctgcggaccgtcaagcacgattcaaaatggttgaaaggtgaacaaacaattaaaagaaggagggtcggaggggaggggaatacacatcttgtgggagatttagagtctggagggaccagactgtatcttcatttgagtaatggcttctgacagacagaaacatgtaaattgcatctttggcttcaactgatttatttacctcccttttttccttcccctgagtttctggagtattaacaaaactaccaatgccacaacaatagaatacattacattcatgttttcttgcttcaagctctcatttctgagttctgcatgaaaagaactgaacaatgtattcatggaaggggacaggggcttggaggtggtggagaagaggagaaaagctattcacaaccctgtatgagtcagggtgacaaggcaatgtatacaaaatcttctctgtaataggggcattccattgtggaaaataaaattacagagatatgcaaaattccatatttcttcattgttgattgcaaagcttctgaaagagataatgtgtaagtgtgaatgccttgtgaaatcaccagcacttgcatgtgtgaagtcatttgaaatggttagtgttaaccaaatgtctaatggtgctacacttttaattaataacatgtctttggctacacttgattgaaattctgttaactctgtttgacatgttcccaattaaagtgcctgtttgtctacagaaccatactttgttcaagccgtggattacggagattatatctacttcttcttcagggaaatagcagtggagtataacaccatgggaaaggtaagaggggatgctgtccttggctcagtttgtaacattttcagaaacccacacctttggtcaaatgttgttataaatgatcttgaaatgagagccataaatctaataacagagtgcggtctggaggccctatctgctgtttcagaacagtaacgaaatcgcaggaaatttcttaagtatttctatggaaaatttatgtttggttggtttcatgctgagattcaagtatcttttttttctttttgagacggagtcttactcagttgcccaggctggagtgcagtggtacaatctcggctctctgcaacctctacctcccgggttcaagtgattctcctgcctcagcctcccgagtagctgggattacaggcatgcgccaccgtgcccagctaatttttttatttttagtagagacagggtttcgccatgttggcagggtggtctcgaactcctgacctcaagtaatttcacctgctgcagcctcccaaaatgctgggattacagacatgagcctccgcacctggcccgagattcaagtgtcttgagatgtggtttccaggtatactcaacagttttgttttttttttcttaattgagttgctccacagagactgtaactatgcagtatctttaatcaaattgagttttgatttttgtctttattgcaaaaagcaatatacaacacttaggggatgtccattttagttctttttaccagagagtagatcaaggtccctaagttggagggtaacatagaatgccagggtggcttgcacagattcagggcccagaggcagctagtgaggatggcagagattgtgcatacaaagtgtgcttttgtttgaggaaataaaaagctaagcagtctgtatggaaatgactttatgtggctcggagctgattccctgaaggatttatgactctgtattaaatgccacagccttatcttttaaaacatgctactctaatgctgagttttcctctttttttcttttctttcttttttttttttgttactgattttagaaacagtattaagcaccttgttgttttgtttctgttttcaaggaatgcagattctactaagatctccttgcaaaatgaatgcatttaattttccctatgtgtttttcctctgcaggtagttttcccaagagtggctcaggtttgtaagaatgatatgggaggatctcaaagagtcctggagaaacagtggacgtcgttcctgaaggcgcgcttgaactgctcagttcctggagactctcatttttatttcaacattctccaggcagttacagatgtgattcgtatcaacgggcgtgatgttgtcctggcaacgttttctacaccttataacaggtaatcatgccctagctgtgttgacctcatcaattcttcctggcttccttctcccagggggttctcttctaataaaccatatttgcaactgactgaaaattgcattcattgtgtgtagctaagaagcacttaacacttagttttcatcaacaaattaaaagtagtttataagcactattaagttaggttttaggggaagtaattagataaattatgacaatatcttctatttatataagcctggtatataaacactttttatgtgttatttataaatccttctagtaatcctagaaactagataatattgtcttctttttccacttaaggaaagtgagctcgacatattatactacctggtctaagtagtcagtagatggaagaggcagtttggaactcaagaatgttcgtcctgtctcttctaggtcatctaataatttgcagtatttgacttttaatattctcatgacgggatcagtaccttttgaagttaaaacattggaaatgtattaaattgctacagggtgaaatctaggattcaagataaaggactttggttattaacctgtccaacaaagccacccttgggcaagctcactcaccaagttgggccacaacccagaccccaaccacagcaccagaatctgactctggaaggctctagtgagaatttataaatcatcaaacattgtacctacaaattatgagtgtcagcctagtcactcctatttttgtatttacttaaaactaagactttgagcaactaaatgatgcactggtaattgttcctagagcagtgaaaatgtgtatagaacagaaggaagataagcattagtgtttttccttagtactcagctctctgttaagccaacaagatttcagagtcctcgtattgttgtgtgaaaatgatcctaacagtgtgcatggtcgtgaaatctaaattcatgcactgtgttctcatttctgtgcagaattttgggtgttctgtattgagtatgttcctctagtaatactgttttgctttgaattataaaactttttacaaaaacttttaagaacttgatgagtgcctaaatgacaggcaccaaaatgataaaactaaaggataacatctagaaagaaatgcttaagaacagagcaaacttcatgaaggatgaaatcatgttcctcaattatacagcggatgagagtcaagctccccactgaaaataatatgaaaatacgaacccgtattgcaccaagaagtattcagttagatataagtaagctttaaacatctgtagggatttttagacttgtggataaaaacgatatttaaaaattcaggcttttattgctcatacatcagagcctatctctctaggattttgaaaaagtatactgtcttggcacatggaaatgcaggggctaccggaatctaagaccagttctagttttctagtttctgttttgttttgtttgttttgtcttgttttttaagggtgtgggttactttgtgattacaatatagtagtaagcccttaaatattatagataactccatttacagtattttcttaaacggcccctaagaaatatccacttagtgcatgattatgcagtctcagaaatcatatttgtttggtaatctgtacccacctaaaaatatacatacccattgtcatctataaattatagtccctctgttttcactttctctggtttcatccctctacttcatgctttacacatgcaaacttggtcatgtcaaattgtttcaaatccatttgccctgaggataaagccctagctctctggcatgacacacaagcccccacagggtctggccccatttccttctctagttcatcccctcccatcctctgccatgcagcctgtgccatgggctgatcggagcaaagatctgctccttgaatgtgccatgctttgctcattcattgctttctgcgagatttgcccacctgaccaacatctgcccactaaaaccctgcgggtacttcaaatgtcagctagtcacctcctatgggaccttgtgcatacttctttcatactctgctcttaccagaccgtcctgaagatgttgttgttatgatttttgttattattattattattttttttttcctgagacggagtctcgctctgtcacccaggctggagtgcaatgagccatctctactcgctgcaacctccgcctccttgttcaagcaattctccttatttttgtcattattcttatatttgcctccacactgaagtgtgagccaactgagggcaagaccctatgttgtttgtggtgcacttactgccttaagtaggggttctataaacatatgttgaatgaacggaagatgggaaggaatgaaggaaaattgaaaggaaagaaaggaacgaaggagagaaatgtaaggaaggaggaagaaaggatttcacaactgattctaacctcaggaagactacgaaaccctaggatatctttagttattacgaggtgcatcagaaaatacttcaaatagtatttatcctatttttcttaatatataaagaaaatactatatgtaaatgtgttactttccgaaaaggaatatgtgatgagagtgttacgaaatcaaataaataatgcaaaggttctgaaattccaaaacaaatgagaatcactgtcttttttttttttttttttttcttcagacagagtctcactctgtcgcccaggctggagtgcagtggcttagtctcagctcactgcaacctccacttcccaggttcaagcaattctcctgcttcagcctccggagtagctgggattacaggtgcccaccatcatgcctggctaatttttgtatttttagtagagacggggtttcaccatgttggccactctggtcttgaactcatgatctcaagttatccacccacctcagcctcccaaagtgccaggattataggcgtgagccacttcgcccggcctatcactgtcttatacacttaattctgtgaacaacatatgtacatgtataaatttataagcatttaaaatttattttgccaccttattttaaataagcattttaagcttctccctatttcttgctttaagcaattattattaagcaattattattcaataattttcttatgaaattaaagatggaataaattctcctaatcatttatgaagttatttttatatctgttcaacatttgcaaaattcaagacaaaatcattctctctggatgatattccctgccctggatgatgttcccacactgcagggcacccgtgtctcttgtcctgggcgctcttgccatgtaatgacccactatctcaaagcctgattaaaactcttggccagctggtgcctgtaatttatttgatcaaaatcaaggagcaactctagtcaaaaacaaatgtgggtccaaatgtaaactgtgcacccagatgaatgaataattcattccttcccatcattgattaaaaaaagaagcctaagtccttccaggggtgccaggcaaggatataattataggtggagctgatggccattattgttatttatcactttataaagtactttatttgcaaagtgatggcattttagaaacttaaattgtttagtcttacgtaagtaatcaggaaggtaaaaatttaaatgtacagagactaacataaaatttgtgtgggtttccccacaaacatattctcacaccctaagttcttggctcgaaaaaccaaattcaaagaagcaatatgtggacaatgggagagcatttttgtttcaaattttcaccaatattagtgacacagaacgctctccagagacttcagagaggtcattaactgataattagtaccagggaattcatgaaacttctatcactagctcaacaattcttcttttataaataaaatcagttcaagaagcaatgtagacatgaagagtttttttcctctctgtgagcttcctataactaccccattctttaaggcaactgatgcaaatttgattgagagaaatattttctttgtgtactaagatcccttatatttatagtgtccaaggtatgaactttaaatttcatttgctgtaccaggaaagtttctctggagtatgttccaaaccacatgcataaccattgcatgagtaacacttgatgtgaaatatcatgttgtagcatccctgggtctgcagtctgtgcctatgacatgcttgacattgccagtgtttttactgggagattcaaggaacagaagtctcctgattccacctggacaccagttcctgatgaacgagttcctaagcccaggtatgtgcaaatattcatatggctattttaaactttagaaatggcaaagcttgcacctctgataatgaacatcctatgaactgcgcaccagtgccttccatgccagccaagcagattgccttcatctcattaaccaaaacccaaagttaccttctcatatactcaaaccaatgttcctctagtcttctgcttaacctccatatatgttatttatccaacgtaacactacaatggtggaaaccatctgaggtgtcactggcttatagttgggaaaactgaggcctggagaggtaaagggtattgtacaagttcaatagcgggggttgggggtggtgatttccgctgcttctttatgcttcctttcaattttatagagacccatgtctttaaacccaaataaaatatgaaatataaatagtgttttccggatttgtgaccaagctggatcagagctcagtctaggactctagaccgagggtgagaagaatccagcgggtacagtggaccattaagatgtctctggtctgccaggttttggtctgttttgggtccaaatacagtgcagtgtcctcctccccaaatcatggcttagaattcttttcatgggatactatggtccagaggcaacccagagacctctcagtcctatgtagtctcttcccaaacaggctaattcatcctaactgggacaggagggaagtccccgctaagccctttgcgtgcctctcttctgtggcacgcactcacacctccattgcagcatttgcactccaagtttcatagaaacaacccatggtgtctgtcttccccaggagttgtgtgcctctggaaggaagcccaatgtcttactaatttttttgtttttcaactctcttccgcaacctccagtcctccccacaacatacctagccaagtacacttacatgaactaacttagataatacgaaccacttaaacccagaggagaaactcatccatcttcattacctgaattatctggcatgttgatattctgttacttatggagagcagactaggtgtgaaaagcacaccccagcaacctcagacagatagtcttaagtcattgcctgggattgttaactaccttctagatagttctagatagttccttctagcaggaaggggagttcagcctgagggatcaggtttcagtaagttcttatgtaataccctctccttggtatgtaaagatggtgtcactcaaccaataccagcacacatactttaagtgattttctactaatggcagtgagtttaattaaacatccttccacatgcctgcctcgtccctcttgcagcagtcaggatgctctacggggctggctgggttagtgccttgagacagtgtggacataggagtggttcatgctggtgtcgtgagggtccaatctcctcttctgcaccacccaggcaaaccaggtgtctggacaagatgggtttcagtgtttccctaatctgactttgctgggatgacccttgactcctgaaaccatagaatttcttgtagaagcaaatttttatggtcgtcattcaatgacaagaaatgacctttcaggaaagaatctgatataattggcttttcatacctgccaaaatcaaacaaaaataaaaacaacaataagaaacaaaaccaaaatgttctctgagcgagccccaggtaatgaaacatgattacacggagtcttgctggcacataccctggtgagttttggagagtcttttctttctacacttgcgaaaacgtcaacctaattctttccctctgtagagtaaatgcatgaggaatctctagcagcctttttggataagtaaaaccatccccgagatatgtgcaaaccacactcactcacttgtttcaagctccatcactgtttactgaggtttgtttgtgcttctgggaggaagccagcctgcccccagctgaggctgaactgtgctggctgaggctcctcagaaatgaggaggcggctcagaggaaatctcagcatattgtgcttggtggcattctgcattgttcaacttcctcctctcaggctgcagtacattctcctccattccagatgcttagagaagcagttcattcaaagaatttgccataaggcagaaaataagctccctccttcctcaccctttgtttcattttaggccaggttgctgtgctggctcatcctccttagaaagatatgcaacctccaatgagttccctgatgataccctgaacttcatcaagacgcacccgctcatggatgaggcagtgccctccatcttcaacaggccatggttcctgagaacaatggtcaggtgggtgtcaaacaaaccgtgtcctgatggatttcctaacttcatctcatgtcggagaaccaatcagtggatcatgctttgaaatgccacaaacatcttctgctatcctgggcattcattcagctgtgaaatggtggccgattggttggataccactaaacccctatacacacattcccagggagaagagttccaatattttcaggctagttggacacatgccagcaattagaggaaggaaatacctttccttctggattagcccattgatccaatctgtgcaaaaatagaggagcagtgaaggagaaccagtgaatggatgtggatacctgattggttggaaatgattacaaaacttgcagcagattccacctgagcatggctcatggattgtttgctgtcacacagagcacagataccacatttgctggtgtgaaggattcatagtttaatattctttttctgaactggtggccaacagcgaagggacagccaattagagatctgtggtagtattaaaaaactcttccttgtatttattcagagcttatttccaagcagttcaacaggctttcccaagtaccatcccactgtggtagccatcaaacaaaatgttaattaactttaccactatttttatactatgactttattaaaacatattaaagcactgtaatagctctggcacacaaaatggaaaccatggtatataacttgcaggagggtctatgttttctggttccagctatggtgcttaggacaactaggtccccatggagtgtcaaatgtccaagggatttcagagaaagcaaattgctagtaggacttatcccaggtatgcccttcacctttagctttaaatggatattgtttggcttgcaggtccttacagtttttagtagtgccattagcaccctacctcctcatccttcagaaagctttccaatcaaacattttgttgatgaaggccttgtatctcagaggaagagtatggagaaatcgcagtcattgcttttcaatgttaaattaaaggttaaatgaatttcttattacttcttaccctcctcataggagacattagtcttttccttgttcatgaaggggattattgctaagtggtttcaggtggttttggctattatagtacttggcctgcaaacacacacacacacacacacacacacacacacactctctcacacctccttcctcccctttggagccacactagtgctctgcaaatggaaataaagggccagaaccacttgagaacattatttatatgcatatatttttcttgaggttattactagaaggctatgtcgcagctgtttgaagtggaacagggaacactttaatgatagaccaacaaagagataagaaatgtggtcctgtcattttagataccgccttaccaaaattgcagtggacacagctgctgggccatatcagaatcacactgtggtttttctgggatcagagaagggaatcatcttgaagtttttggccagaataggaaatagtggttttctaaatgacagccttttcctggaggagatgagtgtttacaactctgaaaagtaagtggaatatttggttctttcttagtaattatttgttatgctattatggcccctttcattcagagaaaatcatgaccgactgaggttttatgcatttttagatgactttttagtgctgtttgtaaaaatttaacacctaaaaagcattattttctccttgccaatgtgtgtgtgtgtgtttatatagatacatatatgtgtgtgtgtttatatagatacatatacatgtgtgtgtttacgtgtgtgcaagagcagaagggtttgtttgtttcaccgccagttagattaagagattgccttgtgggctgggaagtgggatgtgagggtggggccgagaaaaagagaagagtctattaatgatattatcttgcctgatgaaattagatgcagctatgatggagtcgaagacaaaaggatcatgggcatgcagctggacagagcaagcagctctctgtatgttgcgttctctacctgtgtgataaaggttccccttggccggtgtgaacgatatgggaagtgtaaaaagtatgtattttgcctcattgacaattagaaagtccatggtggctaggaaacagtcctaggtagctcatggtcatcctcttcctgcagaacctgtattgcctccagagacccatattgtggatggataaaggaaggtggtgcctgcagccatttatcacccaacagcaggtaggcagcctgaggtgtgggagagggtgaagtggcttccagccaaggtgtattctagatgtaagatttgctctgctcacacacaccaccacacagctttctgtgcaaactccagcaacgggactgtcagcctttctcctaccctttcccatttcatagagcctcaccacatcacatgtggcagatttccaattgattaatcatcctcggactgattaaaaacacagaatggaaacacagtgggcttcaatgtattccctggagagagagacaagaaggtgcctgccttgatcatcatggtgggagaaaagcagagaaaaggagcaataggataccaattagattagtgagtggtttgtccagccatagcaaaaccggcttttgtaattgactgtgcagggctgagaagaaattgcagaacatttgttaagcaatgtaattgtactgcaagcatggtgtatacatccaataaaccttttcctgcgctgaagaacagttgaccctattactcatcaggccgtcaatcaattcttggcagttctccaacagatcagctagatgaggccagtccaccatgcctatgattttggtgtttaaaattgttaccctggctttaaatgcttagatggcattagctaagaggtttctttttatgcttttacttcagtggatgtgaaatccaaaataaatttgcagaagtattcaatgtttatctttgatgggttgtggcaggcagtttaggaggttagacagcacagatctttcttcaacacagccatttcttcaacctcctcagatccaaagggggaacagaaccatctttaaatcactgtgagcctcccttcctatttcagaatagctaaacaaacagatcaagggcatatctgatgaccactacctgcataatttgaggacaagtactctcgtaaacagagctgatgataactataaaatctgacctagaaatttgactaatgcaaaaggttgagtctctgtatattattagaacagctttgcaagtagcattattgacatgctataatcttagagctctgtacctttgcatgggaaccctcaaggtggaggagaaaggatcacaaagcatggtgaggggagctatgagatgacctatgtcctttctatgttcaacatgtgaccgaaggctataagactgaattttaaaaaattattgttaagtcaatataagaaccccaaaatagtttccttaaggtttgcattcatatttcaatgatgctggcattgcttaaaacatggggcgttccctttggagagtgggctccagggcatgatgaatattggctgtcattaccactagaaatcttcatcttttgagggatttgatttttaatgtggcaaaaaagattagaaaccaaacacggtggattattagatcaagctgtgactttcaaaatagttttcctatacggctcataaataaactctgaaagcagttgcaaaataagagtttcaattatattatgggaatatgtacaaagtgcccccaaaggaaggtgactctggtgtgcttattttaaaaatcaaaatagcttttattaaaattggttttgttaatgtcatgttgcttgtacagcccaatggtgacctagtagacttggaagaaacatgagcatgtcaaagagaatgagagtaatactcccaaggactggggcagggctgggagtgaacaaataaccaagcagtctccacaaaatgcaccaccggctcctgtcccctcacttggacctttgaacactttatcgtccaagtttttggctagataaatgtctaggcaaaaaaccttgcctaggaaggcaagggtaggagtgaaaaagagaatagagaaaaaaagatttttctttttaatttatagacttccatattgtttctatgaggcgtgtattttaacatctaaacttcttaaatgtttaagaaatgctcagagaattagagtaaagaaggatgtaaataatctgcaagctaattatctccctgaataatatctgaattcactgcttaaaccatggcttctctttggagagtcacctaagactcgtttctataaacttcagagataaattttaaagctgttatgtatttcttttttgcacctgccactcaatttatcaaactgtgttactgtctttagtgaagcttgactcatttctgaagactcacgttattgtattcatttctgtctctctttcccttccttttttaaaagactgacttttgagcaggacatagagcgtggcaatacagatggtctgggggactgtcacagtaagtacagtcttttatccatttttatctttgggcaaagatgctttcagtgaatggcctagaaacatcagctcacatgtggaactgagtgcagctgacactaaagcatgcgtaaatgacggaaatcatcttctaaataccaaacaaagaaagcagtgcgttctaaagccagtgttgtcaatgttgtcactataaatgctggcacctatttcattaattctaatgcaggggaaaaaattcaccctagaggatattaattgtagcaaagcagtaagttaaatcagcatttccattacaaaatgacagttttgctgtttttaaaaacatgcttttatactgtcattttccgccaaataataataagattgatcattgtactctagctttttaattgagtgggcctgttttattcttgaacatatcgactaacaaaagcaattatgtttttaaattagatttgtgtctattaccatatgtaataggaaaaaaaatttcagaaataacccacaagtacaaggcaattcaaaataatctttttataggaattggcctactatgtaaatctcagagatagttattaaatggtaacattttagttagaactttacgtaaaggatctggctcaaatttctgcccagttgtcatgtgacccgattaatatcaatattctcctgaaaatgctttattaatgctaatttaaagaataataccatactcttggaaaatatgtttagtttgtgctgtttcgaatgttatatatgctgaatttcaagaagcttgcattcaaaatggcaccaaataatagcttctaagggaatgaagctatattatcctgatatttgattctataacggaagtcacggacataactctaaatctttcagtcataagtactgaaatttcagactctaaagtgtcattcaactttctaccttatcttttttagagattagttataatcaaataaagagggctaaaggcagacttatctccaaatctttgccatatacatatttttcatttacaaatattatatattggcaaaaattcttattatgtcttacacacaaaattgatgagttaataaataagcataggagaagtgtcatcactaaaagatgtatgttacgtgtgtgcgttcatccgtatcagggaaatagtttgatgtttgatcagtggaccttaatcatcttggtgcattatagctttatttgcaaggaaacaggttttaagatgtgtgtgtgtgtgtgtgtgtgtgtgtgtgtgcatgcgtgcacgctttattaacagcttagttagctgatgttaatgagctattttcatcatatttatattacttgcaatagtggtgtctgtagaaaaataggggtgtagatttggatcaaatcagaaaatacgtgaaacatgtaaagatggttggtactgtgtctataaaatgtccactataccagtaggctcacacccttatctgtgttctcaggcagaagaacctaaggaagcctctgtatgtagcataggggacgctctcaggtcccaaccctgtgctttactctttatttccagagtaatcttagtggtcaagcaagcccctggatctgccttcgtgctttgtagtgtgcctttgacctttaaccccactcttgcggaggcacttgccaagggtgcttgctcggggcaggaggtaaggctgcccctctgcctgcctgcctttgctcatggcttctcctctccccgtgttcctgctgaagcatgaactacctctattagacagacctatccccacataggtattcagggaggatttctctaactggtacaatcattataactggtacaaaattaacaggattttaaagggaaatgaggaaatcacaaagagccagtgttagaggctgagtgaaccagagatctgaccccaacacacagcacacacccagatatgttgcctaatatgtgtaagggtttgttttttgttttaacttccaaactaaaacccctgatgatttcagaacactgtaacactggacagtttctcacagcatggttgtgaggatgaagtaaaaagagaatgtaaagaataagtgttttctttgtaagtgtggtccaggtatcacttatgcatatgcatgtccctctgtataaagaagggtttaaactctcgaagtcacctataattgcagttaccatttcgtctgccaactcttgcattttctctgcctcttggcaaaggcagtgacttggaggaaattcacttggtggaagagatatggaggtgagaaatcggactgagtagaaggcatcttacattacacgcagaaattaaaaagcacttacttagtatcggggaccatacgctggcatagttctgtgttagctcattcccacttatgtaagtcgccccaagcagagcgtaaaacattaagtaaccttctcctcccttttgtctttcagattcctttgtggcactgaatggtaaggaagatattactctcataattccatactggtggaaacctatctgagaatgtctatttcattaatcctcttgagtatgttcaaatcttaagtttctttttaattaattttttatcctcatcatttttttatagacatttcaactcctctaccagataatgaaatgtcttacaacacagtgtatggtcagtttacggattttttttttttttttaaattcgtgaagtcattcatccagcagtagtttatagttttcattcctaaacatcatggaccagattctttgttactttagggccccaattcactaaaattatttattaatttcaccgtccttcaaaaattactctgcctatgtgagacaattgatgtgggagactgagtcctaaatttttaatccagataacatgaaatatgccaaccttagggaatttggtgaatacatttaatgagttcttgagggagaagaaattgcttttgaacataagtatatccaagacaaaggaataatgctcctaactgatagactatagctcctcagctgatacagttcaccatcccccaaaatgctggcactcaggacaataccctctgctggcgaaaatctatacaggatacacaggtcaggctcttattagacaaaactttccaatatagtatgaaattggccactgaaatttaagctcaaaaagagtatgaatatttagatatgttttcagtgcgatttcttcagaatgtagacaaggaagagtgacgcagtggaaatgatgtgcaaacaggatttatctcattgttcttggtctgaaatacacaatcactatattaaacaaagctactaagcccataaacagaatattctgaactctttatatgagaagttgaaatggagctgttccatttacatttctcaaggtacccccaaatatttattagggtaaactatccatgtgtttttttaaagtatgatatgaaaaacatccatgtgatggcaaatttaagcctctgcattataatgcaagctgtgagtttcatgtatacacagccattttatagtttgtgtgtttaagatatataatcaagcaacagatccaggacagtctttaagtacagaaataggtaaataagggagggagaaaaataaattttaaaaaagggaaaagaaaagaaacaaaggggaaggaaaagaaagcaatgcaggtttatgatccaaagaaatagttcctgatggctacaaatgtgtttaatagctctttgtaaactctcactccctgtgtcaaattagcatacataaatagcctttttgaatatcttaaagactggcttatacattggagctgtgtaggtatggaaaacagtgcttggtttctcctgactggcctccttgtgaagtaaggcagtgtggagtagataagcccacagaattcatccaactttaatgttccctcatctatgattgaaaccagaatattgaacaccaaagactagaagaaaaattgctcagaaggcaaatgtcacctagttgagactgccttgaggaaaaaaccgcacttagcatctgcttttttccaatatgatactttgcgatcatttcctataattgaatagtcttcatcagattttgagaaattaagatcttgaaacgaattgaaccagcaacctccccagcattcatcaatcataccaagaccaattttaactcccaggtaatttcttaaatagacagaataattaaactatgagatactcttatgaacaaaaatcactacctaagctatgttctctcttatttcctttacaaaaggaaaggtacttacttattaatgcttccgtgttaacactttaagggatgatgctcattcattttcaggtcttgaggcaactaaagaagaggtggaatttttctttcagctaatgatcctatccatttcaggctaaatctattcagtgtgaagcagttagatgattaattgaccatcaaaatgagagctggttcagacagtacttacaaaaatattggcaactttttaaaataaaccattgcaagggatgttaattttggagttaataaacccagaatagatttcactaattcattcggcaaatacttgttgagcaactactgtgtcctaggcactgtactgggcactgtatttgtagcatcgaaagaagaaacaaattgctaattgtatgagcatggatatagacaagaaagccaattccaaagtaaaaagtgcatgcacactgtttctagctgtatcctctgcatgtcctgcactctgtggctgagtgtaggctcatagagccaactacaaaaccagaactgcccaacccaggaaaagggatcatttcaataaacgatgcagagtttctgcttgtcaaaagctctgtatcacaccagttacatatgcaagaatcccttttagtgaattgggccctgattattttccttctctcttcctctcttgtattgatttagtgtctctgttttgtgtctaattgtctacaaacattgttaataggttagagtagtatgaagggtatctaacctctggaattacaatgacttgtagatatagagaaacaatatgatgcattaacgttaactttcaaaatatacctatttatttgtattttatgagaatgataaagcataagctccattgattaaaaggtgacctttcttattggactgataagacaaaaatatagattccaaatctattgacatatgatatcacatccacaaatgtttgcctatttttgtagcattattttggttgcaaagtctcttagggaatgcacaaaaataatacaaccttaaaaatcagactagaagatggaatataagtggtttccttgtaatttttttttaagcttggagaggtaataacacatctttgaattcaaactgaggactgctgcttaatggtgcttttacagggtggttctaaaatttttgagagtcaggtattgctttctctgactgtttaattcaccactggcacgtgtttcctatcctcaagcataagtttaaaagattacaaacctcatgctgctcagttttttctttccagtaaatcagatgcatggtttctctagatttacatatagaaaatcgagatgtggtgggtattagactaacacttcagtgataggaagaagagactgatttctcatatttgtgtaaaacattctcttacctaactaccatctggtccacattaatttcctctcatagccatagctttccattaccaatgagttttccatgtattcacagcatatgggccaggaaatctttctacagagaatgtgtcccttaggcatatatttcccctagattaccgtattaagaaatgttctccctaaaccatacttatggcattaccataaaattgcctcttgaacacagttaaattgaaagtgctcaaaatgcgtatcaattcaggtaaaagaaatcttgctacttggaggggaggtattttttattcttccccactttctctttctaactccctacaaagctatttctaattatttgcttatgctgggcactgaattttctcttaggctgaccatatattttattaaagtagtcttgaattcaggagtggaaaaaaaaaagttatgttttagacctcaatgtaagctgaaaggaaataaaggaacttctatatttccatttctcaggctgattttccttcccctgttctcttatctgtatcatgacatgagatgtgaacctcagaaatgtaaaaacaaaaagtctagaataaagcattccttgaattttaaatgaacatgcttttagcagctggatacgaagcagactattttcaacaaattgaatgtttcccacttgtgtgagagccaaacaagtgccatacagaaagggacctcttcaatgttaccaaagctttgtggcagcatttaagtgtggtggctccatagaagtcactatagcatggacgagccacttggcttgctttttcctgctaatcaaagttttaagaagataaaaagctatctttgttatatatgttttgtctaatttgcaatattacagtctcctggggggaaatccaacttccaataataattgtaaaaaaaaaaaaagaatgcactgtacttattcttttaatctgtctttctagaggccaatattttatttatcatgtgcatggtgatcatacttcaaggctggagcttttggagttgttgtgagtctgccctactttccaccaaaggcaccaattatacatgcacagtagttgcccttgtatcttttaaaaattgttcaagaggttgttctgtgtaagccaataactccacttgaaaatcacgaggaggtcatattttatttctgccagagagaacaggtatcattgtgccagcttggatcaaagcacctgatacaatctgtatttaaccttgtggaatgatggagggagagcttacaaacgaattcacaggaaatggctagagtttctgctgtaactctcaacctagccattcttctcatattatcctatggtagcttatctgaacctcagaaatctatccttttctaatttgaatcattttagtcaacgcagcctcagaaacggaaaccatctattgaaataatacacaaaagggacagccgtaatagcgtgtagccgttgaagcctccattccaatgaaaagacagtgggaatagatccctttggaaaccactaactaatcccagaaagaggaatgcctgtgaagttgagttgaacctgaagactagacacactgtagaacctccataggaagggtgcagagtaactgagttacttgtgatagggacaagacttacccactaccagaaacctgccccatcggtcacaaatgggattcccagagtggacactttctgtgtttagtgctgccatgggaatatcaaagaaggacactggcctttcttgagcacctatgtgtcagacactgtgcaagatgctttcaccattatgtcactatcctcccaacaccgagaggtatctttatccccactgggtgcacaggaagaggttaagtgattccctgaggcccacccagcaagtatgagagataggatctggcccttcattttctaactacaagttcaatgggctttctgctgaacacaccccacaccaccaccaccaccaccaccaccaccaccactaagccgtgtcatttctagggccatctcctctcagtcttacagccagcttgggtgtcccacctccaggcctctgcgcaaagggaatgtgggtctctctggtgatgttttcctaactgtatttgtgatgaaaacagggcattccagttccctcttgcccagcacaaccacatcagattcgacggctcaagaggggtatgagtctaggggaggaatgctggactggaagcatctgcttgactcacctgacagcacagaccctttgggggcagtgtcttcccataatcaccaagacaagaagggtaaggccttggaaatgcctcttcctctcgggggagagggagggaaaagtggggaggactgtgtaactgcttccagctgaattttggcagcatttaaggaacctccaatgcgctatgattgaaagtttctcgaaaaagactgcaaccccatcctctatgtgaggcttgatcctaaattattctctgaccaaggaaaaaccacacaaaacaaataatatgtcctctgagcttcctctacccgaaaaaggtgtggcttggcccgaagcagatgctggcttctgacatcccttgccactcttcttagtctcattctgtgatttttggaccgtcttttcccaccataatgtgatggaatgcagttcgggctttggcaagtgaatgcaattgaagtaaaggccctgttaatcagtgaattgagaaatagcaggacaaagtcttttctggctggtagcatctctcactgttgcatggtgctgaatttgaatagagccatgttcctcagacgtactgtaattgcccttagaggatagtagctaagacaaaaatatgttatttaatcaagcagaattgctatgcatttacaacggaaaggaagccacactaaatgaaagggactctactgtgaactgtcctaaattctcctttgctttctttgcttagctgcagacaggaaatgtcatctcttttcttgccatttgctgcttctggtaacacatcctactttagttgcagctgcaaccaaagaggcctttacttgtccaaaaaacagtcttgtaaatcagagactgaaaagcccagttatgttgctgagctgtttctccccattcagaattgtttacttctatatgttttcaagagtttcatccaagcgggagtttgagtttcaagggcagagcagccactgtgacccttggaagacagtcgctattgcaccctcccccagagtgttctgcatacatatctccatcttcacttttagacaatgctttccggtcagactctcaggctacattttcatctgcttttttgcttctcatctcctgagagtgctgggcactctgctgctctatttgccaagtcaaaatataaagatggagccccttttgtcttgttcttgagcgtgtcctcttaactgattttattttcttctatagacttcctcttagtaataagccctgactcaaatctttttttttttttttttgagatggagtcttactctgttgcctacgctggagtgcagtggtgcgatctcagctcactgcaacctccgcctcccaagttgaagagattctccctgcctcagcttcccaagtagctgggattataggtgcccgccaccatgcccggctaatttttgtattttttttttttagtagtgacagggttttgccatgttggccaggctggtcttgaactcctgacctcaggtgatccacccgcctcggcttcccaaagtgctgggattacaggcttgagctgctgctcccggccaaatcttttttttttttttttttttttttaagctggttttgtctcatctccttctttcagtttgagggattccctgctctttccatcccgagaaagctccaggtagaagagaaactgtccggacagattacaagccttagcatatgccattatttgttatgtgtggctcctgacctcagatgtgctagtcctgactgtattctcaagaagagaaaactcagtagaaatcactttgtttttgcccactgcgttttttctgaaacaaaataaaacagcctttccaataaagcattaaatatgccaactaaatatctagctgttggttgcagtaattttcttttcatttcactgagaggggtagcgtgaattttctctaatcgttaactccccccaaggaatggaggttctcaaaaagtccatttaacactttgacacatcattttaaaattcggcattgttcattctcttgggtcttattatactgacaaagctggaagcagtctacatattgtcaaacaatggtggcagaggtgactgcatgggtgtttaacatgatcactgttcttgtgctagtaactccttgccttgccctgtcaaatttgagtttcttttctgtgattggttgtatgtttgatggggcaatgccaatgagttgttgtgcagaaattttaaagaaaagatgtagcttaatgttccttttatcatagtttttatgattttaatttccattttgctccaaattgttttttgtttaatgttcatgatttattttcaacttttgtttcattttgccaagcactgtgttatgacttagtgatggcgttactccgttggaaaagtcttgttccttttctgactcatgatggcgtcccttaacttgaacgaatctgtgatgccctcgcttcttttcattccctgatgtcggtgccttaatgatgtcacatccgtgtatgcagcatctcccgggatgcaagagtttcatgggttttctaagggcctgtgacgggtgctctttctactgggtcgattgtctcatgagaatgtgacatttgtgtgccccagctttaggagctaaatatactctggaattgtttctaaaatccatcacatttcctcactaagcagaaaatgtgcccgctgaccagctcactgaggagtcaagtgtccattgcccattttattttggccactggtaaaaatgccagtgagcaaggcatgcccatggctctactctgcagatatgctgactgccagtgagctggtcccattctttgtccacttcatcctccaaacaattctccatttccagagtatgtttgctgcgtttttctttcttttccttgctatgtctttcgtcttgatttaatcctgtgcgtccctcacattctgtcgaaacacccttcctcaccttgcagcctaacccccttctgctaccattgttcttagcctccccctttcaaaataacagacccaaaccctctgcccctctgtggaatgttccaaggctctttccttctacaccgtgagtagcattctgatgctgtatgtatatacagtcatactaacaaagcgtgagaagagacctgcacagcacgcggaagcattatcatagaaaatgaagtaattttctctctcagtaactggccttgcccttcattaccctactggccttgtctaatgtctcttgtccttgctgcttttctttaaaattgcctgatatctttcaagccctggattcattagtaaaaacacagccaactgctctgttttatctctggttctctagatgtctggagcctctagagcgagccctttaatcaccaagttgataaatgagatgcagccctgactacttctgtcttggttttgccacattaaaaaatacatattatttattcctcctataactattgaggtcgtaatgggtagttacaaaggggctctaatcacatataaataagaaagaaaatccagtttatttttagatctggcttattctccaccaccgcttcccacagcaaaagaaataagagctttcttttttaggttaaacaatactgagaacaaatagctattcttgtgcctcttattccttaccaaaagtaacaatactttaaagctgatttccaagaagtctatgaggtatgtaaggaaatcagccacatccagagcagccaagagagctgtgtagcatacacataaaatgtaaatgctgaccactgctatgaggacacaagaatatatcctgaatagaataaaaatcccctacttcagactttattttataataaagagttcttgtgagctctcagaaaacagacaaaatagtaaatatagagcagttcccatttaatcagaaatgccagagttgtagtatgcttctatcttttgggaaatctttaaagtgagatattatcacattattacatttagtccagaaaatatgcacattaaagacaagaataagatgtattacagaaacagaatttaaattagagattaagtgaataagctaaaatggatagcaaatgttgaatatattttaatcaatgtacaagctatttgtataagcagtttttagtttgggaaataatattccggtaagattcataagatctataaagatgattagtattgtccacatctcacaatcctaaatggaattttataaatcacagatgttatcaataattctctttatagttaattatttaatctttaaatttgcagtagcctacagcagtatttcctccgagggagatgagtagcaccttacatggcatgatttaggtggcagggatgtgatggccttcaagagtattgagtcatgtggtggaaatttatgcccttttcaatgctctttcagtcttctgcgttatcttcttgattatgtgaaaggaaaagtctcagtttggtgttttctcattaacaactccctaaacttgctactatctctttttgacaaagagagaatagggtttacactggggctttgtcttccaactggatctagctggaattaacattgttttgctttaagttaatttttgttttactggttacattttatcgttgaaaagtgacactttttttttatttgtgataatgatatcaagtttccctttgaaatacattttaaaggtaatttaaatagaatattaagtaaataatgcaggagttatgagggatataaaaatactaagtaaataatatggtaggtgagattcattgttatgactaaaattgtagtattggtagttgaatgaccaaagtttaggtgactgtgtactgtagcaattgaaggagtccagggaagattaaactattaccaagaactttgttctgacatttggaagaatgaggtttgatgaccactataccctctcctggctgggcttgcaaaaccaagtgaatacatgcgtcactccaagtgttgtaattatacaatccagtgcccttctgatttctttgctacctactgagctttgtgtttggggatggaaagtttcatgaaatagaaatttaaagtaacatggatttagactaataagaaattagccactctaggcttgttaagcatctggcaagttttttctccacaccagcagcaagcaccctagtgtggtctgccgctagttattactcaaattgtagcctagggaaagttgatgaaaagcctttccacttttcatctattttgctgatatccagaaggactcttgtgctacacagtgttgcccggcctggcaatagcttacccttgacccttctccttttctcccgttcaaactttacctattctaagttccaagccttcagtgtcagctgtctttattaacagactgagaaatctcattttaggtgagtatagttaatcatagatcctaccccctggttactcttacattttaacactctcccatgcttaaaatgtaatggatttgggattttaaagcaccctggttctcccaacacagaaggtaattttttggctcctatcaagtcatatgtaagtgattttatggacagagaaaattattcctgatgacagtaataaaggaagaaaaataggcctctcctcttttcctgactcttaaacttgggcttaattttctctgccatttcttcagtaatattaccgttaacaaaaacattttctgaggtgtctcaagcagaatttatcactggctctgtggtgcaatttggatgccaataaagagtaagaggctgtattagagatagacgtagttcctgtccaagaaatatcaaacaccagacagatggaacacaggtagacacaaaagcacaccaaaaggcctttatgaccaacattctctttgtgaaatgccaaaaccacacaccacagactttaaaaaaatatattagacaagtaaagacaacttggctgaacacatcaaggacatagaactgtgaaacagtttttcagctcctttccttcagttctttccctcagtaccaatattgtagcaataacacatcacctgacaaggaagacgaggaaagtgatggatgtttggtaaaagactcatatttaaaatttttgtgggagtgttggcaaactcaggcttttattttttttaagcctaagctttatttcaagaaaaaaaaaactcatactaatttgcattccttttattagtaaaaatgatcctattgcagtcgtttttaaatgtgagagtagagcaaggcagtttcaaggagacttcagaaaaagggctcctgtcttggggagtactaataatgggagggtaagggttttcacttccactcaacaatggaaaattaactgagtcaggtagaacgtgcatggtcagaggcaaggaacgcgaagagatagtgaattgattgtgacggttccaaaaactcttttgaattagagatcacttatttctgattttgaaggttagaggaaaggcatcttcaaagttcgtaagaaatttggtacataagctggtattgttgctgactatgaaaaatacagttcttaatatttagttcatcagtattttatttataaattgtgctatacacgacccataaagatttatcataatttttattgctctaaacttttagagattaaaaagtttaatttttagagagtaaagatttagcatcatttttattactctaaactgcctgtaatctcagctacttgggaagctgaggcaagggaattacttgaaccagggaggtggaggttgcagtcagccgagatcgtgccactgcattccagcctgggtgacagagggagactttgtctcaaaaaaaaaaaaaaaaaaaagagattaacaattttaacctctgaaagtttgggtgggtttaaagaatatttgtgggagtcatttaaagcacactgtttgggaaaagaagagtagggttgctaggcaaaatacaggatgctcagtttatttgaattgcagatacacctgaataatatttttaatattgaaacaaaactaaataattgttagtgtaaatataccgcaaatattgcataggacatacttttaactaaaacatttttgtttatccgaattaactgagagtacttaaactttttgctacctgacaattctatagaagatgtcactgataacttactcagtgaatatataagatctaatttatatattacatttggcctttaactcttagaaatctagaataatccatattctgatatgtttaagaaaaaatcttattccacgaaaaatattcttagcatacttgagttcagagaatgtctatgaaatattatatatgtgtttgaaatgtgataaagagtaatttaaagattattattgaaaacaggctttcaaatgccactttcaagtaaggaaggctcagaaatcaaattgttcttaaagaggagcatggttaaaactattggttcttttatgttttacttaacctcaaaattttaacagctgttatgttaaccatatgtattcctttttccttcctaaattatatggctgccctcctttttatttttatttttatttttttatcattttcatggctttggaggggtagaactggaattccgaaagcactaaaaaataatagtttaataatgctgacaatctcatctcaaagaaaggcaagacagcaacctttcctttgtttcttttttcctgcattcaacagaaattgaacaaacatgtgctatatgtaaaccttatgctgagtgttacagaagatactaatttgaatttcacataaacctgatattcagacagcttacagtttagtgagggatacccaaaggtgatctaaatgctggggcagagtgaagtctgacagtaagggaagtcaaggaaagagggggagggagagtactaagggagtctaaggggtggcacaactaattccaagtgggggacacaggaaagacctttcaaagtcttgaaggaaaagttagatttcacaggaggaagggcattccaagctgaataaagtccatgaccaagataccacactgtgaaattacagagtgtaataataaagaggcaaggagtgtgtggtgactaagtgtatggacgactagaatgggaaatgagattgaaatcctagcctggaaccttaaatgccatgccaaggagttttggctttagcaacaggaagtggaggatgggaaggtagacgttgggaagaaagggaccacaggagggtagaagtggggaaagacaaagatagcaagattgacaggtgatacatatataataaattgttcatttaatcatattaggttattaattacatgtacacaataagtttgggaaatggaattttgcatcaattttggatctaaagtgtctgttactacacatcgctggcattttcctggtagatgcttcttgcctatctagctctatcctaggtaaaaccccaggcaagctgaactccaaacttggacttcttcctctctttagttaaaacagtggggttcagctgagcacggtggcttaattaataatataatccaggatgccactgtttatttttactatattaatatttcttggtcacctacgagaaaaggaatctatatgtagtctccgtcttttctttgagggactgaggaaaatgatattgtgagcaagtcaggtgctgggctctcaaatggatgatgtgggtttccatgtttgaacgtgtgcagggggagagggtccagagccgagaagcccaagtggcaggctgtaattgttctttcagtagtgtgggcatagatgtagatttgatataattaattttgtatccttttgacaacttgctgaatttatctaaggtcttgatgagattattgtggaaagggtagcaggaaaaaaaaagttaaatgtcagccatgtagaaagctgtttcatctctctgcctgcctgaatttgcacacccgtatttgagttttcttttctagggataccactaaccttttattttttaacctaacattcattttctcaaaaaatgaaggacttaaattatgattatggagacttgaacttttgcttttaaaacgccaacttaaaccttagggtattaaaaaaatcaattcaccttctagaggtgcttctcacctttaatctctagccactttttcaagctgcatctacttgacatgacactttacccccacccttttccctcagtctctttttccattctctcccatcttttctacaaaaacacacacaatgacaaagttttctgacagcttaatggaactttcaaggactacggggactaggttaagtgtgatcttattaacagaacatctggagtggttaaaaatttgctctttaattggttcaacggcactgtgttcatctagattttgttttgtcctaacgataaaattgtgaagaatcaattagtagtttgcattatgtggaaaagtgggaaaataatatccgctttgtctcagacctttctttctgatagcctagtttcaccaagttttttttaaaaggcttgttagaagttttactttgcaaacttcactgctccatagacaaactagtccacagagggcaaaacagtggaaatcaggtaatttcctgagaatagcttctcttttcttgacattatacctgagactggcctcaaactacgtagggcttgctcaaactaactacatcacgcatgccattatcctggaaagacagaggatgaaaaaggtgtgttcatttgttggttccagggagatacaggttatgcaagtaatagataaactcttgcaaagtgtatgggcttctctagggactgaaaggagccatgtgaacctcatcatatgtaaatctcttagcactttaaattgtggaaacgccctgaagtatactaccgaaatgtagtggatatattaaaatatactgggtgcacagtagatgggatcttaattggtgtcagaaagccaattacaggcaatgtgaaggtttgtcacccttaattaatatttcttaagctcttataagtctacagcctgacaactatctttgtaaagagattcatttttaatggggtaataaatttttttccactccaattatttttaaatttcatattttttaaaaggatgcattccttttcaaacagatatctgcaattacttcttttttactgaaatcagaggcagtcattatgaacagtatagaaataatggaagttcggtatagtcaaccactgacaatgctttattagaaaggaaaatggtgtcgagaaatttatagggcagcaaactgcattatgcctaaccttttggacgtattaaagcatgtcatttccagtcttacagcctcttgttattcataaataatagatagcactggacacaatcatctgacatttgttaaggtaataaatataccctaagtgctgatgggtctcgcactccatgatttaaaagcacacagcagaaatttaatgtaacttaaaatgtctcatgtaattctatggatttgcagattcagttcaactcagcagatcaataagcacagagctctgttgagtgaactgttgtgctaggcatcttttattattataaagcaggaccttactttggtgaatgacacatgaactcaagtccctcttttcaccccgggaatataaaggagaagaaccttcgtgagtttcttttctctcgtctagtcatgcagagatgaaggtaaagattttggcatcccctaaaccattctcaaacgttgcttaatagctgtaagttgagttgagggagtgggttttgagatgatattagatgcaggcctttaaaggaagccactctgtccaatggtgggctccatcaagcattctgcttcttctgcacttgagaaccagttatgcctgggctgacccaatctaggacatacgtgagctctgtggtaccaaccactatctgacggccacagttacagagatgaggagtattagaaattctcctccaagtcttcctaccagagcaaatagagaccacaagcattgtttcagcagttttggtgcaagcaaattgggttgattcttttgcaggagtagcagcccagtattttgagctatatgccatgcttttgacagatactaagggaaagtgtttgttaggaatttgattgtctttccaataaaacaaggtcgatttctattctttgtcagagcatgatacccacagtaaagaaattatccaatgagaccttagatatgttttctggaatattatttatgttatttcaggacagcatgtctcaagctttagagaacttaagaatcatctggagttctggtttctgggcctaacccagagattctgaggctgaaactttgggcaggacttgaggatttctgtctctaattagttccaggtgatgttaatgctgagtggcactgattcagacattttccacgttgctgatgggctgtcttatttaagttcactagtcaaggttttgttgtagttgtaaatccttatttttacacttttggctaacacagttgaaccctaccaaagtgttgccttaaaatagtctaatcttggaccctgtacaagacaggcaacttgtcaaacattctagaaatactgtccttacattattaattgagcattaacacgttttctgcacaatgccaactgctttgtgttcatttattcaacctatttagtccttccaacaatgctcatcttatagccaacactactggggcctggagaccgagtgacatacccaaagtcacacagttagctatttgtagagccaacacgcaaacccaggtctttatgagctcaaagtgtatgttcttaaccagtaacacccagtctcatctttaacccagatctcaagaactacatttctagaaaattcaagttggaagatttagcagtattgaaacagacctgtttcttcatatctgttttatctttgctttatagagaaaattcaaagcaagtaatcaaataatccaagcaaagacttgcccaaatttcacaattttttaaggaggtccacttctccattttgtggctttgatgccttttgagagagtaaaggaaaaagatgggaccaggaagttggaaaatagaaatgctttgtctggttttagaaatcacttagatgttgtgtttctcgtcttatttaagaaagctgatgaaagaaaacttcaaaaagcaggaaaatacgccttgcagactctgctaaaactttgccaatgtaaaagaatcattacctttacggggacagtaacagttctaacacatgaaaccacaaaccagcattccagggcatggcttttaaaaattatcttatcatgactcttagtctagacatcagcccgtgctctggctgtagcactcccattggcaatgccatttctaaagcagtagagcagtggaggaacagtgaactgagcgttcccagcacacagggaaaaatgaagctgtttcttctctaaaaaaatgaaatagaatgaattccaggctcattctcccttctatccctgtgatgacatcccaaccaaaaatgcatcacttttaaaggtgatcgaagtggaagtgggttcatctacagtcaaccactccaagcattatttcaatatgtgagttttaaaatagcttctgaattcaggacattaaacagccaggccaggaagctacctccactttggcatggtcagtcattaactttatatatcttgaagaccatggcccctcctggtacctaatctgtagcctgccaggaaaaacacatacatacacacacacgcgcacacacacatgcacacacacacacacacacacttaaaggaaaaggaaactttaagttataaactccaagcctatttccatggctgctggcatgtcagtttattcctaagccatctggttcacattatgccgtaagacaagaagaaggctgcttcctgcccagataaccacagagagttcccatttcactttcagcgtggtcacctcgactggctggggtgtggctttgagaataaattgtctccagttagggtttttcccttgtttgttttcttctcttcttaatagggattacagcgggccctgtgtggttagcggggcgatgcttggctagtgattagttcattcatttatactgtcttgcaggaccgtgagcctggaattttgttgcagtaagatttgcaaacaagaaaaattgggctgttagattccattcactcaagttgttatgaggatttcaaggaaattgtaggcttgtcttactataaagcagaatcaagaatctatttttaggggatgctactccggggcttttcttggtgttttgccatctttcttagctctcagacccaacacaaaccctctctggctcagtgatggaggaaatgtccatcctcctttttgcctttgcatatttctctaaaggacacagagaggctttgttgtctttgtggtcaccgggtccactttacacagatgcctattaatcacttcactatggagacagacacatccatcatatcacagcagctcagaaacgggccgtccagtgaaagggggtgagaggggaaagtgcacacttaaccatttcgagttaggttactggttgcctgtgtcttacacgcttagggtggtaattggggtgggggtgagtagagctcttcctttgtatttagcttaataggtgtgattaattttacgtatttttgcttgtctgtttgcttcacattttgataggacagataacatctcccagctatttgtgtaaggtgcagggcattagtatactttaagattgagagttttaattttaaaaacagtaataataaatgcaggtagactagctgtgcttttgatgcaatgatactgactctttgaagccaagagttttgcgataatggattcaatgtggaacagagcaagccgaaagttagctttctcaggcaagagaaactgcagataaattaaccaagaactttccttctatgagtggcagatcttctaaacctcttttttaatcattcaaggctgtccacagccttccaaatggtatttctagctcttgctcttgtattttctctacaagtgctcattcatgtatgcattcctttactatttatttaaaagatatttactgagcacctttctgcctgaagattcagtggtgagttttagcagtctaggtgagaaaaacaagtatcatactagtgatgattttagaataaagggaatgcagagctctggggacactttagaaggaagaacttaactggcctaaggagtcagagaaggcttccccatttaagctgagccctaaagatagggtctgatgagtgggaaaatgagtagggacattccaggcagagagaacagcctgtatgagagccatgaagcaagcttgagtatggaagggtggctcatgcctccagcctaacagactagaagggagttagaccatttgctattactcactacggccttccctttccttccctccaaggctcagttcttgttgctctctctgctccagctaagatcctgtgcatctttaaggcttagctcaaatgccatttccaatgtaaagcttttgcccactgttgaagcagaagtgatgtaactcatgacatagccacactttggacagagttgtatgcaagcacttgccttcttccctgctggtttatgcctcattcatcattgtccttccccgacacctagtgcagtgcttggtaaatgtttgctgaaggcagccacaaagatgcttggagccaaaaccttgttatactaggagagtgataataaagaaacaacccaaccctaagttaggggaaaacatcatttctaaagcaaattgtctcagagcctggtgctaggttccctttgcacggaatagtatccatgagcaggactactagaaaacattttttaaaataaggaatgtagtgtttgatatttcaaaatttattaacatggtcatcataggaaaagtcagaattgtattgggcttcctcttagttttcagtttacaattgttcttattttgaatcacatgttgcagggtctaggggcagggtccttcataatcttttcattgctttggactctaaagaacttcaaatttcctctctgaggtctccctccagcatctgaaaactctcacctcaggaaaaaaaaaaaaaaacagtggagattctattctttctcagttctgccaatttaagacatgatttcagagaaatctctaagccagggtgtgccttgcttcctgcaataggaaggtggaaagactaaccatttagcaccttatgactggtgagaaatagctggtggttaatgaatcaatgcaaaggatttttcaaatactgttttcattactaatgccccattttcaattggtaagagcagaagaggatgcaggggttggcagaggaaggaatttcaagaccctagggtagagaagccaactctgattgttctctctgcagtgggaggatacctgcggaggggagtacaccaccctccaagggccctttacttgcccagggcttccaggcagcatctgaagcaagggatactcagctctagcctgttgccctttgccctttgccctttgcagagatgcattttttttttttctaattattcagttccactggggcactctgttgttgtaaataacccatttatcgtcatcgactcttttggatttttcccagaactaatttcatttttgaaatagtttctcttcttattgttttgagcaaatactgagcaccattatagatttatttttgtttgtctgatagatgctactattaaaattcttttatatgattggagatagaatttatttccatgacttcaaaagcaagggtgatagtcactctaaagattacctcccaagtttagaagttcatttaaaaatagctctacaatgtattgaaaacccatttattcagccatcatttgttgagttacccaactaagagctctgtggatggcaagggttataaatgccgaaaaaatgtggtacttgcccaggatttgcactccactgagaatccaactataattgccaacattttccacttctgttgttttaattatttcaaaattcagtaactataggcatcctgaaacagtatgcattcccttatattgcttcgaaatctcatatcacctttttgactacatttagaaggcacgaagtttggacctggaagcacaggtctactcctctcccatgggagaccaatagcaaatggaatccaatggagcagctgcgactatcacttggaagccctctgtgagccactaacccaccacttctcctttgtggcttcttttgagctttagatttgtccagcaaactacagcatttaagctctttcctattttttatttcctttgattcttgtaacaatccagtaaggcagtaagattaggtgtgttcacctcatgctacagataaaaaaactgaggcccagagatgttaagtcacttgccaaaaggtcacccagccagtaagtgggagcctgcaattccaagcccactgagatcttctctagctgcttttatcaccactactgacaagtctgctgtttccaagccttcacaatggctattccacaaagttgacttgatcatttctgtgaatgcttctttggcctttttcatgatataagcagaaagctttaagtttgaaaggcatttccaaaaataacgtttaccttatcttcttcaactgcactttcaacttactctctgatctgtttccatctttggacgtttctgaatttacacaagcagatgaggaaagccctctgcctccccatggatagatgaagacatgcaaaaatgtttttaaggccactctttatataacaaaatgagacgggggaaaaaatctgtctgagataccattttcctgaaaggtcagatcctacttaacttgttaacaaccaaaaacctgaactcaaatatcatccactaaaaaagagttcttcccagtgaaagaataagtagctttcatgagtctaaaatagccaaggaccttcagacatgaaagaagaatgatatttgggagctaaaagtaaggctaagaagcaatggatacatgtgaaaaatttgcagttttcccagtgaaaccaatgaattgctctagctttactctttccacgttccttttaaactgagagggcagtttaaattgtagaatgccaaagtcaattgtaaatagcttcctattataatacacatttattgggaatatccagtccccctaaatttggtagcctggaagggtttcatgaaatactcattgccatgaaaaaaacacctaatacacccccaccccattactggggccgtctagcctgtgttcaactcccactgaaatcaccaagtcaatgagagaaattaaaaccattttatccacaggtgtacatttttgtgcaattatatgtagggggttaaaaacggtgttcggtagaaccccatacataatcaaaattgaagaaaaatcagtagctattttagcataataaggaaatgcaaatttaagaaagaaaattttcattagcacatttccttggtgaataggtactaaaatatatttgaatgcaggacaccccactgtttggggagcttcacacataaaaggtgtgagttacagccaaatttccggctgttttttgcttctcagtttctaccccttaaaagctgatggagataaatctggaaatatttgaaaagtatcacatttgaaaattatttgatatcttaccgtcttgtacactctttccttatggtgaattgccttgactgccttttattaccaagggtatttgttggatcacagaatctttatttcttaagagatatttgctgcttctacttaagtcacaatcctttgtcacaggacaatcatttccacagcaaccaactgtgatgtcacaattgaagggaggaggacccttaggaaggaaagaaaaagagaatgtacttttcaggctaaggtttctgggttttaaaaccatcacttcagaaatcaaaatattttagcagaaaaacccccatgagaaagcttcaaggtctcggctgtgacaaagacaacatttcagtagaagtttaaggttgcgtgttgtgggcttgggaaggggtagagatctttatttcctttcattctaattctgtgccactgatacctgccagtaaaatacatgaaacatattccagaaagagttgatttagtagatgaaaaatgcgtctcccgagaccagagaaggtaccttttctgtcttgctatcatttccataataggaacaatgtttacatttcctcagcccatgcagtgcctctaatgtattcatgttctttcactctccagaggcaggaattgaggtattagagattttattttttagcgactgcatcaagcacttaagatctgacaactgtgatgtgtattctcacttggtattaaaaaataaaagcttctgtgtttgcatttgattagagtcactcagctgggtggctgattaagcaggaatagcgaaagcaccttccttcagaaacactgaatcctggttaatgtagtgtaagattacggatgggtgtagtcacataatttttattaaattgaagagattagctctgctgaaaaatcccactgtgacagcaaactctaggtgcaataatggtacctaacacttctcaaacccactacagggccccaaatggtcttatttctgaatcttctttcagttccagtgagaaagcttcattcaaatattcaggatagttacctgaaattgagtttgcactgtttttttttttttttttttttgagaggtgatgcaaaatcagcacaaacatttgtagtctgtgaactttagctatattctctcagtgtaaataaaaatgacacacactctctttcctctagttgcttaaaaggcaaacacttttccccagacggaggctccggtggccacaagggggccgtcggaaaagatcccaactggaagcccagagtgtgtgatttgtttgtctaacatgcataaaattgttgcctcttcctccagactcaggataacttggttatcccagttctaggaagggaaggttaaaaagccataaagaaggaaagaaagataacttttgaaagccaaaacctcccatattccctggagtgaagcagagtagaaagtgcaggtactggaaagagtgaacagcacttttctttctttctttttttgaaacggagtctcgctctgtcacccaggctggagtacagtggcctgatctcccttcactgcaacctccacctcccaggttcaaacaattctctacctcagcctccggagtacctaggatcacaagcccccgccaccgcgcctggctaattttttttttttttttttttttttttagtagagacgggggtttcaccatcttggccaggctggtcttcaactcctgacctcgtgatccacccgcctcggcctcccaaagtgctgggattacaggcgtgagtcaccgtgcccggcctgaacagcacttttttagacaacaaagaaggctacaaatggagtccatttacatactgcacacgaggggcttggggaggattaattggttaatgtttggcaagctgagcttggaagacaagttgtgcagaggtgctgttgtcacttactactgttattaattaacaaggtgaatgccaagcaaaaacaagcctcggggtgtgctttcatttcttaacgccatatgcgatgtctattgcaggagtgattcgggaaagttacctcaaaggccacgaccagctggttcccgtcaccctcttggccattgcagtcatcctggctttcgtcatgggggccgtcttctcgggcatcaccgtctactgcgtctgtgatcatcggcgcaaagacgtggctgtggtgcagcgcaaggagaaggagctcacccactcgcgccggggctccatgagcagcgtcaccaagctcagcggcctctttggggacactcaatccaaagacccaaagccggaggccatcctcacgccactcatgcacaacggcaagctcgccactcccggcaacacggccaagatgctcattaaagcagaccagcaccacctggacctgacggccctccccaccccagagtcaaccccaacgctgcagcagaagcggaagcccagccgcggcagccgcgagtgggagaggaaccagaacctcatcaatgcctgcacaaaggacatgccccccatgggctcccctgtgattcccacggacctgcccctgcgggcctcccccagccacatccccagcgtggtggtcctgcccatcacgcagcagggctaccagcatgagtacgtggaccagcccaaaatgagcgaggtggcccagatggcgctggaggaccaggccgccacactggagtataagaccatcaaggaacatctcagcagcaagagtcccaaccatggggtgaaccttgtggagaacctggacagcctgccccccaaagttccacagcgggaggcctccctgggtcccccgggagcctccctgtctcagaccggtctaagcaagcggctggaaatgcaccactcctcttcctacggggttgactataagaggagctaccccacgaactcgctcacgagaagccaccaggccaccactctcaaaagaaacaacactaactcctccaattcctctcacctctccagaaaccagagctttggcaggggagacaacccgccgcccgccccgcagagggtggactccatccaggtgcacagctcccagccatctggccaggccgtgactgtctcgaggcagcccagcctcaacgcctacaactcactgacaaggtcggggctgaagcgtacgccctcgctaaagccggacgtaccccccaaaccatcctttgctcccctttccacatccatgaagcccaatgatgcgtgtacataatcccagggggagggggtcaggtgtcgaaccagcaggcaaggcgaggtgcccgctcagctcagcaaggttctcaactgcctcgagtacccaccagaccaagaaggcctgcggcagagccgaggacgctgggtcctcctctctgggacacaggggtactcacgaaaactgggccgcgtggtttggtgaaggtttgcaacggcggggactcaccttcattctcttccttcactttcccccacaccctacaacaggtcggacccacaaaagacttcagttatcatcacaaacatgagccaaaagcacatacctaccccatcccccacccccacacacacacacacacacacatgcacacaacacatacacacacacgcacagaggtgaacagaaactgaaacattttgtccacaacttcacgggacgtggccagactgggtttgcgttccaacctgcaaaacacaaatacattttttaaaatcaagaaaatttaaaaagacaaaaaaaaaagaattcattgataattctaactcagactttaacaatggcagaagtttactatgcgcaaatactgtgaaatgcccgccagtgttacagctttctgttgcagcagataaatgccatgttgggcaactatgtcatagatttctgctcctcctctcttttaatgaaataacgtgaccgttaacgcaagtaactctttatttattgttcaccctttttttccttaaggaaaggactcttccaaatatcatcctatgaacagctcttcagaaagcccattgaaagttaaactatttaacgtgaaatccattaactggaataattgagtttctttatttttacaataaattcactgagtaaataagttggagctggaattctgagctttgtgtttggactgtctggtctgtagctaaaggaaaaagttaggaggggaatatttatttaaatctatcagttcattgcctggtcaggtctctggcctataaacatgcaaaaaaactaattcatgttaaagtccttccagatcctaatttctaaagcaatcaggagagaaagcttttagaatggcacatcatatctcattgatgccaacatggttttgtccatggttctgactttctgtgaaggcaccagcttgcaatatgccatcccatttcaccttgcatgtgagacagcaaacaaaatccacaaatggtgtgaactaatatgctggctgctaccttgcataaattaatgatttgatcacacgggttcttcgtggggttacatctgtgaatagcctgttttccacatgtaaatttgtgccttacaccttgagttgtgtacacttgtaaactctttatgatcaactgttcccccttttgaaataagtgcagatatttatttaaccctcccttccccaccctctgccccacttccagccctctgaaagattggagtcaagcagatggaagaatgcagtggtgatagttgtcatgcgacagcctgagaacgctgggcagcaccacaccctccaattcacactgccttctagttgtgccaactggaaccaccctttggctgtgctgcgaagcatggaccccagtgttgttgtgggtgtgtcaaatcccctttcatcctcaagagctccctgcttcccttagattatttcaatacggtgatatccttatttgctagcagaaaagggactaacgtcccattcctcttttctgctgcgtccactggctagagagcaggcggtgcgcggttgggcagacacctgggaggagtctccaagccatgtgcacagcacacacgtgcagtgcacacaaagaaatgacatggaaatagatgcaggcaggctggtccctgctgtgattaacgagtaactccaagtacaaggccgaccacaatggatgctgcaaaaacgttgactggggcaaaggattttttattttattttttattttgttaattatgtttttaggggatgggaggtggtgtgtgtttttctcctcttggttttcatttgctcaagcacacaaaagggacttttgtttactctatcatgaacaaaggaactgtccacatactgtaaaccatgagcagtgttgttgttgtttttttaaacagtatatttggtggtctctttgtctgcttttatttccagttcgatcttctgggtttagttttgtctttaaaaagaattcaaaaaaagactgacaatgacagttttgagttggatagtgaaaaagtggagcctccataatcagtgtggttgccttcagacctgagtacttagctgagggtgggtgagagccctttgttccaaaagtccattagttttgctgttgtttaggagtaggtggttgttgttgtttttactttttttttttttggcttttgtaatggaatccatgttcacatcctgtgaactctgtctcctgaaaccctgaagtatttcctagaacctgaaatattgttttcttccttgaattttctctagaaatgcagaaattaggaaggtgatgggtctgtatccccctgcccccttctttcccatgcttgactcccgagagtactggcagtgcagcacccatcattgacgtaagcggctgtcttgtccagtgtttgtaggcatcactgcctcagctgttaaggagacctgtgtcaaaacttacatccacattcctacacccccacaacccatcacttctggtgttaaccctaaaatacccacatgtattgagctggtcttctgcatttaagtatttctccccagtttttttccccactgtgtgtggggggagggtccataaacccgagtgtgcctttgctttccacccttgctagacactggtagatgcaacaaactcagatttatatttgttgtaaagttgtaaaaatattgtgatgtcaccaattttccttccatctccacatcccctaacatctgattcacgacttaatgtatgttgtaagaaaagaaaaaagaaaagaaaaaaagggaaaaaa

SEQ ID NO: 408 - DNA, 160437 bp, Homo sapiens
gtctgcccgccgccgccactgctgctgccaccgccgtcgccgccgccgccgccgccgccgctgctgctgccggtgctaaggagttcgctggagccctttcctcagacccggcccggtcttcgcgcccggactcctggcgccagcgctaggcgcactcaccgctctgacgggtgcagacgcgggagttgtcccagactgtggagtggcgggcacggccccagccccccttcccttccctgaccccttcttgccatcgccccagacatggggaacgcggcgaccgccaagaaaggcagcgaggtggagagcggtgagttgaaggccgggtctgggtatccgctgggcgggccggcgcggggcaccgagcgccctccgggtcgcagcttctgaggccgcgggcacgggccaggcctagcagcggccgccgggagtcgttctggggggccgggagaccagctgcctttctcctccattccgaccccccagctccgcgttgagagctgaacgcgaagggccggatgtggggatcctgggaagagcgttccctgggattccctttctcactctagcgaggaggacttgcacacgttctggaacacttccccaaatatggtccgaggaaagaagtccctagtgccatcccacccctgctttcccccctcgccgactctttgggagctacaggtagtgctgtgggtaaggttggctcttctccctccatcacttgggtccgacccaaccttatcacaaggcgggggctgctagtctggctctacgcaagtgaggctaatcctgagtggacaaccctgccttagagatccttcatctcttcagattaggaatggaaaacataatgagacccaacagcaactttatccattagagaaaaaagccaggcaggtttgccttttctctagacattcaaggatctgctaccaatgcctgtaaaacttaaaggtcattcggagttgaagtgcttccagaacacggttaatttcttctgagagcggaaggtgcgggtactccacactttacatcaaacagtaaaaaatcatgaaaatggaatttctgtatggcgataaggtgtgtgtgtgtctgtgtgtttgtgtgtgcatgtatacacatgcatatatatgtgtgtatatatgtgtcagaatggttgtgaaataaaagttggtttgcctttgtaaagttcatatatttttataattcagaatgtccaaataacagatggtatttgttatatcaccaggagtgaatgacatgttagcacttaaagtgggcctggtgattttagtttgtgtaaatattacttgtaatgttttcatggttgtaacataagaattaggctaattttataactttgcatgaagaaaatagcttttttctgtattaataaagtagaattcatttagaaggatttagtcattcattttgtttaacataaatatatcagattatgtggtttatgtttcatcagtaaggttttggtattcattttcaggagcttcagaaaagtttgatgagctattatataagccaagaacacacagcatgttatacggagatttaaagaagccaatgtagaggtagaatgtatgttattttattattattttttgagatggagtttcgttcttgtcgcccaggctggagtgcaatggtgcaatcttggctcactgcaacctctgcctcccaggttcaagggattctcctgcctcagcctcctgagtagctgggattacaggtgcccaccaccacacccggctaatttttgtatttttagtagagacagagtttcaccatgttggtcaggctggtctcgaactcctgacctcaggtaatccacccacctcggcctcccaaagtgctgggattacaggcgtgagctaccgtgcgtgacctatgttgtctttttaaaattgcacaaatatagtaactaactgtgcaggaagtataaagaatgcaaaaagtataaagaattatttttacctgatatgttgtcattttttgtgttaatttaaagctctattaacttaaaacatgctaattgtgttacaaaagagtgtgcttggagaatgattatattagtagttttcattagcaagtgctgacctgtataatgtttatattttggataatgataatagactcttctgtgacctgtatattttttattaagttaccaaaacaattctcccttagtattaatttgcaactcatagctgtgaaataaccttggaatatttactgaaaacagaatggaaactttaaatgtttatctgaacatatttaaattatttctatggataaattcttttctatgttttaagtgttaatgacaatctagttcttaagtatgttagtcagctttttgtgtaactttatttatggaaactgaaggtcattatagtagtttaaaaagctgttgtgaagtgaccaaaaaaaatagcatgttatgtgtcatagggaaaattatttgaaatgtcacgtgttgattaatgtttgtaatttcatttggagcagtgttatcaggtatatgttgctgttctgtagtgaacaaagaaattgtattttaaacttaatgaaagaactcatcattacgtacctaaatgttctgtgtattttttaaagaattattcttgaaaatttgtttttcaaaacttttagaaatatatgatgttagagatcagcctgtacaatcattccctttcaaagatcctgacctccgaagaagctggagttgagatcatactgttagtaataacagagtaaggaatagagtctgatgcctggactccattcagcatcaataaataatcagttaatatgtttattttcaaaatattcaccaaatgttttagtttcaattaaagactataagtaaaagctgaaaaatgttactgtctaatgggaaagaaaatatgtatatataagagttacctgaaaggcaaaaatacaagtgctaacattatggaaagtggaattagaactctgaaaattgctgtatgaaaatgtttgatttgaaaagttgattaaaaatatcaagtcagttaagatttcaggttcagttagcaccaagcttcagaaaggcaggtgattccagagcttatttctaaaaatattccagaagaatgaagttaggcataaagataatttagaagggtcttggttaactttaactatctggtgcctgtattgtactctactgaaccttttccctctattagaattaacattttctggggtaagacctaaaagctaggtgagattccatcttcatctccacaggttttggagataacattaacttaggtacctgttgttctgctgtagtgaattaggaaattgtattgatgtatctcaaaacttaatgaaagaataactggtactattacatacctaactgctctgtgtgtgtttttaaaattactcttgaagatatattccttttaaaatttgggcgtagttatttaaacgtcagctaatacagagaaacataaacttttagaaatatgataaaattctcagagaagttttaaactcttgtcagttaagtttgttttacttatccagtctcttccttttacaccagccccagtcaccaacacaccaaaaaaacacgctacttcttttaacctgggaggggtttttatttatttcattttaaaaaaatactatacctccaggttgcctatggggctttgtgttatacattcattgcaaaaatgttgaggcccatgggtgaaaagtgttggtagaggtttgaatgtagattctttcatgactgcaagtcgtaaagttaccatgtgacctagtgttcgcatatgatctttgaatgttttccagagtatctctctgtcctgtggatttgaaagtcagtaggaattaatcaaagaaagccaccagtagactaggttcaacaaaaatgcaagtttcttaacaactaacattttttgaggactaatacgtgccaggttctctaatgctttccgtgtataaacttttacttactcttttaaactgtaaagcacttgagttattccttcatttatggatgaggaaatgaaggctcagagagcctaagtgacttgcttaaggttgcatagctagtaagtcaagaagcaacatttaagttgaggcaactgtaacctcagaacctgaaattctaaccactttgctgaacagcctctgtatccaatagaatagccgatgctaagacacacagaatagcttagacaattatagcacatttcagttttcaaacatgactttatttggtatattaaaatcttaagtgaaaaagattatttttttcttgtaccattctctggatttttatcatcattatcttttcagattcaatatagtagaatttcaaattaaaccacataaaactaattttatgtacttaaagccttaattactacagtacttatatttattttttcccatttgtaaatgtatacttttcccttcttgcccaatagttgataaaaaaaattattatttgaacttgtattaccattttaaaagtattggcaaattctcatttcaccatgattagagtagcgctgtccagtcaaacattctgtgataatggaagtgatctccacctatgctgtccactgtagtagctactagccacatgtctgttgagcactggaaatgtgactagtaccactgagaaactgaatctttaacttacatgtggctaattagtgtttggtatattggacaacacaggtttagaacatagttgtttttgcatttaatagaaatgccaacccatctttctgtcatcttggttatttgtggatccttacaagtgagtgtagatgaacggaatgctggatttattttttctcatttaagaattaacttatttcctcagaataagcatttataaacttagtgagcaaattattatagttcaataatttgtgtttaatttattaactacaaagttaaattatttttggggctgtactagaaataaaattttgtgatttttagtaatctcagtgaatatcttctattgaaaaatttctgtagatttaaatgcaatatagtgatttcttataccttacttaggtctttacacctttcaattatcaaaggaaaatcagtagcagatatttgttccaattctgtagaatgcagaggtactggggaagtctttcttgggtgtaagacaaaaaaatcaaagcaatcagttatgcaattttgatgataaatacatatgatctcatcgagttccatgattctgtgattctgtttgtgcagattgtgtactgtatcaaattatctcatgttcaggaaccatttttcttattctcctcctcttattctcctcagtgtccttcacttaggctgtagacagattgttgctttttcattgccagcagcaggataattagaggcatgaaagccagcttagaaaagtaagccatggctgagtgacagaagcagcacgtgagaaggtcctagataagccaggatagctattaagatcctgtcagataattaatagttgaccataattcattttgacattccattaaattaatttttaaaaattagtacaacttatgaagttctatatctaggtgataaatgtttgtatacgtgggtgatcaaatttcctcagattaataaatcctaaattcttagtgaataacattgtgttaaatagaaaagtgtgaaatttatgaaaggtaaatatgcttaggtcactatcattttgggtatttaatcttacttttaaatgtattccttcaagaatgtcctgtatagttctttgttcattgcttcattcattcctttattcagtacacataattgagctcctaaaatgtgacagactctacacaagactatgggaataaagattgaataggacagagtacctgctcagggtgcccatattccagaagggggaagatagacatgtcagcaaacacatgaaacctgccacaaatcctttcattaaagttcagctggggaaccaagggaaagaatggtcatttccactgggatggggaggaagaggttcaaaaaggacttcaaagaggagttgaaccatgacttgagcattgaaaatgataaatgttcatcagatggattataggaggaagggtgttctgagtagaccgagcattgataagtgaagatgcagaggagtgaaaccatgtaacatattcaggataaggaagtaagttgcccattatgattaaatgatggaatgtggggttggtgataggaagaggggacattgtataatgatagatgaaactgaagaaatggacagagggccacataatggagagagtttgaattttatcttttagacactagggagccatcgtgcacttggaaataagagagaaacatgatacaatttgggtttaaaagaggttactttggtggtgatgtgaagataaatcattatggagcaagtggaatagaggcaagatcaattataagactcctatgataatttgggtgagggattttgagggtctgaaccaaggtggtagaggttgggatggagaaaaggatctgaaatgggagaaatttgaaaaattgagcagaatgtattgtactgattgcatgtgggaaatgaggaaaaggaggattggggatgacacgttaagtttaagcttcaatgccatggtagatgggttgtaacgccagtaatagagtcaggaaatgaatacagagggcaggagtacattgggggttggggtggggacttactgaactcgggatacccgtggcatttctgataaatgatagctgattggttattgtatgtgtggattgtcttttatctcccagccatgggggaaaatgcccttggatggtcaagggaccttttctacattttatcctcattttactcttttcaaagacaactgtttagaaactatggaaactataacatctggcataacttacataagttaagaattctatatactaaaagtttagcctttttgttttgaaaagaggaaagccaaagtactgatgagaacaatgtaacttttaaggaaacaaagtaatttaaaatcataaaatattacttttataatttaagtgtgcatcctctaagctattcggttttgtagttatacaggatagtggaaagaacatgtaaaatatagcaccaacatctattatgtactgagtaaatgtcagttttattcccctggagtcctttaacatagatgtttaaaagttcagatgtaatttagtagtaaaatcataaacttgagagtaagaaaaatctaaattgtcttttttctaatacattctaatatctcactttggacaaatgttttaaaatctccaagtgacggtataaaatcaagagggatggattggataatgacactgtgatctcttcttccagctttataatccaatgcttctattatatttattaaaagaaaaaatacacaggaagcagcaagatgagggaataaatcataaaaagtgctcacaaaatgtgtgggcagagaagtggcaaatgatcctcaattgagcaaataaatatatggtaatgtatttagggaaaacttttgatctacatttaaggaatgatagtaaaggacaggagtgcccttgtcaggcagggagggctgggctgtgcatccctctgcttgcgctgcagggaaatgtctcagtgacttttcctgaggaggttcctggcctcagtcgtctccaggaagccctctcaggatcggtggccacctctcacttctggagccctgcagaccccacagtgcagtcctggtggcctggctgtaacacccaactcagcccagaccatatacaccaccagcatctcctcaatgaccattaatatccaggatggacctgactttcaagaccaacagtgagacgccagtgcttgtggatttccacgcacagtggtgtggaccctgcaagatcctggggctgaggttagagaagatggtggtcaagcagcataggaaagtgctgatggccaaggtgtatattgatgaccacacagacctcgccattgagtatgaggtgttggtggtgcccactgtgctggccatgaagaatggggatgtggtggacaagtttgtgggcatcaaagatgaggatcagctggaggccttcctgaagaagctgattggctgacaagcaaggacaagtcctggttcccttgcccccatgggaccccagtagaacttggcccttcctgctgcctccctcctgtctggcccctggggcccaggctccagccatgagtgcttctgagctggcggactgcccaggggccatcagaagatggtgctgctgctgatccggggactgccttcttccctcccacatgcctttcgtcccctccctctagggcctgtggcagttctctcaagatgcatagagagagcccaggccagcccacagcactcctggtcaggcagccacaccttggtcctcatctctggtcccttccgatctgaagcctcgtgcctggctcttctgccacctgcatttctctttcttgctgctgttttgtaaaaagaaaaagaaaaaagaagcccaaactagtgagaataatttataactctctcggtttttgtaggtctgtaataaagaacttagtcatcccacctcctactgtgaagagcagaccctgggtcccacactcaaatcccctgtagttgcccatcctcacccctcagggagccccctcccagctagcctcccgggcagggggcacagaaaatgagtggtgggctggggagccctggagagccttgactctgtaaggctcgaggcacctcctttgccccttaactggcctgttggtcctctgagcagggggcttaactgtgaacaaatcagacaataaagcaagggtctgcacctaaaaagacaaatttatgaatcactgtactgatctttgaagatattttcatgttctactacaagtaaaggagccatcaaaatgttcgccatcagggcagagtcttggaaataaaacatgaaacattctattcttatgtgaaaccattaatgtgctatgtgtagttgtggtgttttgtgtatagcagaaccagagaaagtttagatcagggcagctaacaggagtaagagcatgggaagtctattctgtgtgaataaactgtatatatacatatttcatttaatctagaaaaattaaagttacatgattaaagtgtataaaatcaagtggcatagacagaaaatctgggattgctcacctaaacttgaaacactagaactcatggactattcttccaaacttataaaagctagctgtagaacaagtaaaatgaattatcgtaaaaccttgatatagactgggcttagacaataaatgtatttaactgattagtcatttatgtttaaaggtgaaacatgtgtttacaaattcaggtagtatttttagcaatttcaaaagctagataatgcttttttactctttaaaataattttttatttttatttatttattttgaaacagagttttactgtgttgcccaggctggactcaaactcctgggctcaggcagtcctgcgtagctgggactgcaggtgtgtaccatcgaggcttgtttttttactcttgataggttttataatctctctagcccccagcactttccaaaagaatcatcagtatttataagataagtcttcttcttgctaatactaaggtttactactattatgcaaataaattgtttccccgatatggtggtatagcttaaattgcttttagtggatttctttattttaattggctataattaatttattcatttagttcatttttattccctagccagtgaaatagggagtaaagagttgtcttcatgtagcttatagtctggtaaaagatttagacaagtaaaagcacaattatgagaatgttgtaggaagtggattataggacgtgtttttttgtaatgtgaattagattcagtaatgctatgtatctatgcagaaaattttccgaatcaaattcgggattcttataagttaaattgatacactagcataattggtattagttctgccttcgaaaatccaatgtagatgccatattttttatctggcctgatgtaacaaggtataaagtcccaggctctatggccatagtttaatgttatattcactgttgtcttctattcatatgttaacttttcagggacatctgaaacttgttttgttgtaagataactgtggaatctaaacctttaggtctctgacaagcctgttttctcgatctggactttgtccttagaaaattaaagagactattcttgtgatcatattagtttagagtcctgtttagtaaaatgaatattccatttctatactgtattcttcttaagtagatgaccatatagcatcagcaggccattgttatatgtgagccacaaacttgagagaacatgttggtatagatattacttcttttacaggggctagctctactggtaacttagctctttcaatcttagctcagctccctctgagtaggagccatgacaggttaaactgtggaagaatatgagcctcactttaggctgtagtctttaggtcatgaataagccatagttcaattcatagaatgacaggcaaaacattcacttatttgtctttcattcattcttaatcagtacttattgagcgcctactttaaaccaggcactatgctagtctgtagatgcaaataaaaataagacttggttcctgtccttaaattgggagacagatacagatatttatagtaaggcatacaatgatacataggtgcctgagattaatactagggtgaaaatgtagcataggagtttatagaggagtagtatagaatttctgagatcatcttgggaaatagactgaaactgactgaaatggaaacttcctttgagtccattttggaaatatttacatctataattgtagcacttgtactacattgctttttcaactcttatacccactacagtgtgatctggcaaagcagtgtctatgttgtttagtgttttaatctctggaatgtggcacagttcttggctcatgtcatggtggaagctaaaatcatggatagttaaatggatcaaaaattcaaacctcctgtagaagcgtacatcctcctccctttcctccattggcaggaactttgtcagtaatgtattgactatttggggataatagttgattaatgtgataagagggtacctctttcccccctttttatggtatatagtaacttctttgacatttacatatcaaaattatatcacagttggtatggggagattggtctcaggcaggtaggaagaagacactggactaggaaaaactagagtattatgctcccaaccttttgaaaaatttgttattcaaggcatgtatcattcaactgtgccactgtgtttctcatccttgttgctgtcatttaccagtctcttgcttacttcttattcatcaaatattttggcatctggcccacaatgtttctctatactctaagctctgcattcatcctggatggtttcaaattctatgttaatgactcatctatcatcactgcacctctgttctttgaccatgttatctcctattccccttttgttcattcagatgtctagtcttgccaaagaccttgtaatattcattaactgctcaagaatcaccaatgtgtgtgattctttgatcacaatttcctctcctttttgcttgctttttaaatattcccattatgatcattcttcatcagaacctctcatccatttatccatcagtcctctcactttcattttttcttcttaaccattctagattacttggtcccaaaattcctttgcacatctgcctctttatcaaatctctctaacaaaaatgtaactcatgataaactcagctatgtgctttctcagtgctttcagtcaagagctaagcactgctagagaaagctgcacagaagaacactagaaatttactatcatcaacctcaaatgagctgtcaacatgactttacagttttaccacatttctctgatcaactctgtctctcattcttcacaagttctatttcatttctctctctttatacctctgacttctccattatctctctcattctaagtcatgatattatgtcatattttacaaggaaaataaaagctatcagacaggaacccctttaacttcttcctattaaatgttcacacctactgtattttaacttgaccatcttattctgttataatagaggagttgtctgttatatttatctattgttccatcatgcaggactcctaaatttagcagcttaaagagtgacaacatttattttacttatgaaagtaagtaatttgggcagagctcagctatgcactctatatgacatcagctatcttagctctgctaataaatcactgctatggtttatggggactagaaacacatgaagccttgctcatttacatgtttccctgttgatgctggctgtacaggtaatttgaaccttacctgggactgtcagctgaagcacctacacatgacctctacatgtggcttgggccccatatcatgtggctaagttccaagaaggagggagagagccaggtataagctgtatcaccttttatgacctagcctccaaagtcaagcagtgtcacttcagctgcattctgtttgttaagtgagtcacttaaatgagtctgtatcaagggaagttgaattagattctgcactttgatggaaggagttagaaaaatttggggacatgtagaaatcacattgtacatctttctctgcaagcccaatcactccactattactttggatcccaacccctcctgctttcccaggagtctttgtattcttatcttttatatgtataataatatgtcttctcatttatttaaaaaacgtgtaccccttttcccttcactttcagttttctctttgaccctactttctctttccctttctcatcgctcacctactaaagtgaactggcctgtgatttacagtatgtgtgatcaaatcagttgactttggtgcccaggcaggtaattttaatgtgtcttgggtaaaacctgagacgagaagaaagaagaaagagaaaaatgttctttttctgctcttgctgtattatagttacttacaatcaggttacagagaacttaatcagcttttagaatataacatgtttgaatgttgtggtctgcatattaatatttaagtattaacttgaagttatatgaagtatgtaacaacataaaaaatgtcaaactgggttacatgcacaacctggtttaatatataagaacctaatttctaaatacctttagaatctttgacctaacaatttcttggttctttatgattagatttaactttcttgtttttttggtttttgttgttgttgttgttttgagacagggtcttgctgtgttgcccaggctggagtgcagtggtgtgatcatgagtccctgcaactgctgcctcctgatctcaggtgatccctcccgccttagcctcctgagtagctgggactacaggtgtgtgccgccctgcctggctaattttcgtatttttggtagagatggggttttgccatgttgcccggcctggtcttgaactcctgggttcaagcgatccacccacctcagccttccaaagtgctgggattacaggcgtaagccaccacaaccttcttgttctattactcacacaagtttagcatgagaaataaacacgttaatgacttcttatctttaatctttattgtactcaggggcatcagtgacccaaaaatcttcaaatgttttttcgcagtgatatctgtaacaataacagtgggagccatagtggaggtagagtgggcagaaggaaacttttttggtttttgttatgattggtttttgtcgtaatctactttataatattctgtgtagtagaattgagaaactatgttacagtagtactattttcaagtaaaaatttaattgaagtataccatacatttcaaaagtattcaaatcctaatttataggctaatgaatttgataaagtgaacacccatgtgaattttcacccataccaagaaatagaatattactgaaaccccagaaacttccctcctgcctgtacccaatcattgctagatttaaaatgtggaatactgcatcatgttttcctttgtgactgccttctttcacttatgtatttgtgacacttatccatgtttttgtcatagcagtgatttattaattttcacagatatatatcattgtataagtatagcaaaacatattttttctatggttgatgtaaatttgggttgtttccagtttggagctcttataaataatgctttgaacacacttgtacatgatttttggtaaatatatgtatgttttggtgaatatgtatttgatgaatatgtgttatgtatacactcatacatacatgcatatatacatgcatatgtgtctttgtgtgtgcgtgagagagaatgatgttgaattaattgctggatttctgggtcacagatcatgtggttctggtaaataccaccaaataaattttcagattggttgaacctgtttctaaccagcagtgcttagggttttagtcgctccacatccttcccaaacttgatgtttttcatatttctaattatacctattctggtaaacatttcctggttataatttgtacatcccttatgactgatagtgttgatcactttttcatgttggtattggtcatttggatatcctctttttataaaatgtttttttttttttcaggtatttccccatccctttttttgtggtattctgttgtatttttcaaaaaaattgatttgtagagttatttaacatgggtacaggattttccccccagacgtatgtactacaaatgtcttcttccgtttcatagcttgccttttcactttcttaacgatgtctccttcatactgtttaataattttcaaacgtacaaataatttacaaatcatttcctttatgatttgtgttttgtttggccttcctcggtcttctttaagaagttctcactaccctagggtcatagatattttcctatgttaggtttagaagctttcttttgcctttcatatttagaactacagtctgtctggaatcaagtgtgtgcatctctctctctctctctctctctgtgtatgcgcttctgtgtgtgtgtggtgaggtaggagtcatttgttaatatcagtatttatttgacacatcaccatttaaaaggaaaaagaaattgtcccttccccaaagcactgtaatgacatctttgttatcaaaggctgaatatatctggtttccttcttttctgttccattggttttgtctattttagtgtcagtacaaaactgcatgaattcatataactttataatagaagtcatcataatcagtagtataaatcctaaaacttcatattttacaaaaattttgaatattctttatttttaaatcagcttgtcaattttcacatacataattatatacacgaaccttataggaatcttgagattgcattgaatatatagtagtttgagaagaattttcatctttatgatattgaatttttaagtccatttatttagatctactttaacttcttttagtaatctttgtaatattctgtaacttcttttagtagtgctttgtaatatgctgtttaaattttaaatataattttaaaaattacatttattcttagtttcacatgcttttttgttactataaagggtatcagtgtcaaagttttatcttctaatttttcattgtgagtatataagcatagggttagaaattttatgctgacctatctagtgatcttgctaattttattaactgtaagttatttatagatacatttagattttacatatacacaaatcacttttttgcttaattttgacagtgtaagttttttccttttagtccttatacattttttttgccttattgcactgattaggacttgcaatacagtagtacatagaaatcatgataacagccacacttgtcatattcctggtgtcactggaaagctttcaatattttggaaccaggcagaaaatttttaagatatcctgttatctgtttaaggaaggtttcttctattcctggtttgctaattatttttcctttgagaatgggtatttaattttatcaaatgttatttctgcgtctgtgagttttgaatcttaaattaatattgcatacctggaataaacccattctggttgcaatatattgtccatttcatatccttttttaatgtaatagtgaatttggtttgctaaaatgtctcagtgtgttttctttttatcattattccattgttttttctttgactaatggctacattggttagttttcaaatatttgggggtttttagcttagtttcactgtgttcagagaacatgtttggaatgatttcagttctttgaagtttgttgatacttgccttatgggtcacctttatagccatatacagtagtcatttgtaaatgttccaatgacttttgaagagactgtctattctgctttcgttgcctacatgtactctctctcacacacacatacacatacacacactaagacaattaattcacactgaattcaaggtattctgtatcatgttatatttctttagagaggacttattttacttctggtgtgattcaatattatttttactaattgcagtcatgtggtatgtaacaacatttcagtcaaaaacatactgaatatacaatcatggttccaaaaattatactacttcatttttaatgtactttttatatgtttagatacacaaataccattgtattacaactgcctacagaattcagttagtaacatgcagtataggattgtagcctaggagcaataggctatccatatagcttagatatgtagtaagctatacgatctaggtttatgtaagtgcactctatgatgttcgtacagtgacgagattgcctaatgacacatttctcagaatgtatccctggcattaagtgacacatgactgtatttaacactccatcatgcattattattattgttcagggccctcaatatttatatttatcccatatttgctgttttttttttttttgcgcttattccttcatgcattctctggtctaagttacttgtgccataaataagtcttgtgtaaaggtgtcctagtgatgaattatgtcagtttttatttatctggatttgtgtattttttaccttcactttttcaggatatattttataagtatggaattttaggttgagaattactttctttgaacactttgaagatgtttcatcatgttttgttttccattgttttgttgagaaatcagctgttagtctcagtgttgctttatgaaggtagtatatctttttttttctttggttgctttgagattttctctttgcctttggttttcagcagtttcacaatatgcctaggtgattttattccccctactttctgtttgcaactttttagaatcatggctcaaaatgtttcatttatttaagacagttttcaataagcatatcttaatatgttgcctctatcccgtcttttctttcctattcttctgagataccaattacatgtatatgtaaaatttctgatatataatttcaattattatatttttaatctctagattttccagttgatttttgagtttctacttgtaaatttttctactcatttatatttttgtacaaattaatcatagctatattaaagttcatgtctgaatttacaatttttattaccagtgtgtttttctatggtatgtttgttctcttatttttggttatttggtcttatcttttggcatgcctaggaatctttaattgaatgtattttgtatcatgttatatttcttaagagaggacttattttggctgatggttagagttgggtcagattgtgttgatccatcaacaattaagatgacttgttggctgttctcagtctttgtgaggcttggtctatttcctattcttactcctatcgatggagcctttcagtggttttgactgaaggcctggtggtgtttatcagggccctacctcatgctagccctgaacttcaatttttctttcctcactgtgagattactgaaatatttgcttagttttctaatctcctaaaaaggtgcttctcactatctgttctttagtgtcatgccttaggtatcttaaacatctgaatgcttcaagaagaaaaagtagtacagaatgttgggatttttatttctggtttcttggccctaaagtctctgaattccatttttttcccttgtcagccaagtgtaatgttgaatatttgagccttagctttttgcatgtcctttctaccaattgaggaaatgccctgagggcaaaagctgtaaagaatcttgatctctaatcatttcccatcttttcaggaccttggtgttcctcaaaacctgctgactcctttgctaatactttcaaacaactcttaccccatttctaccaatatttatgttattttaacaagagttttttttatatatcactttattgaagcagaaatcccttgatagtattttttctttttgtaaatctgtgcaatgaatcatagtataaagtgtgcacatttttaagcttatagattgaagagggtttacaaatgaattcctcatataatcgtgactagatcaatatatgcaaattaacagcattctagaaggttcccttgtccctccagagtcaataagcatgcttccctcagatgtaaccactattcttatttctgtcaccatatattagtttcgcctgtttttgagctttacttaagtagaataacaattatactgttttatatctgggattttaatttcaacattgtttgcaaaatttagtcctgttgctgaaggtagggttctttactttttgttaatgtatagtgttccatggtgtgaatacacaatttattttttctttctacatttgatggtaattgggttgttttccagtttgggactattatgactagaacttctgtgaacattgttgaccatttttgtgcattttcatacacacctatactcatttctgttaggtatatacctataaatggaatactgtcataaagtatatgtatctgtagatacattagtagatagtatctacattagtagatactatcaaactgttttcgaaagaggttataccaatttgcactcacagtagcagtgtaggagagtttccattgccccacatcttcaccatccttggtattgacaggtattgttttgttttagccattttggtgtgtgtattaataagggttctccagagaaacagaaccaataggaggggtgtgtgtggggagaaagattatttctataataaatctcctcttacatacatatatacttattatggaaattgactcatgattatggaggctgataagtcatataatcaagttggggaaccaggaaacctggtgctgtaacttagtctaagtccaaagacctgaggaaaggggagagaaaatggtttaagtcctgggctgagtctgaagaccaaagaaccaggagcactgacgtccaatagcaggagaaggtagatattccagtcttaaaagaaaagaaaaaacaaaaacaaaaacaaaacgtgcgaatttgccctttctccacctttttgttatattcaggccctcaatacattggataatgctcatccacattattaaggtcggtcttctttattcagcctgctgattcaaatgctaatctcttacagaaacattctcacaaacacgcccagaaataatgtttaccagctatctgggcatcccttagtctagtcaagttgacacataaaattaaccaccatagtgggtgtatatcaggatataattatgcttttaatttttgtttccctgatgattaatcatgttgaacacgtttttatatgcttattgggttattcagatatccttttttagatgtaatgcctattaccttaaattaaatcttttgcctatttttctactgggaaaagaaaataggagttattattttgcagaaatgttatacgtacgcatagtttatgaatataaataaaaatattttctccaagtctatgggttgcattttattctcttagttatatattttgatgaacacagcttttaatctcaatatactgagagtactaactttttacatagcccattttgtttcccttttaacaaatctttgcctactccaagttcatgaagatagtttcttttgttcttctaaaagacctattatctttgtcacatttaggtctgcttgcatgtctcagagcagtagaaagcaatattatcagttgtgaggaagaattatgggaaaagtgttggaagtttggtaaagaggagaaggtataaaagtcatctagaagagtgggagattggatggactaggggagtacaatatgattgccagataacagtaaatatactcttgaggtttctggttatgaacttcaaatcataaaaagttaagagtagtttgtttttctccagtcttacccagctgcacaagtgcaggcacagtgtaggtatagagatttcaccagggttctggttttgccaagcaagtatagacaaaacgagagagaggcaagtggctgaaaatgtatgctggaagtgattataatgctcggctttggaatttgtgcattttaaggaggaaaaaagataatatttggggtatcaaggatcctgaaaaggattagagatcctggtaaggtttaaagattgttgaagttgagatcttaaaagagagtgagctaaaaagatagaacatggttagagagaaagggtagaatgaaatgggctaagggtatgatctttggagtcaatggctaagacagggtagggtgggaatgtacatattaaatgaatttagatattgtattagaaaggttagaggatatacatattcgatgaatgtgtatatcttcaattaactacaaataatccaattttatttgtagtgttaagtatagtaagaaatataagtacaatacctgtttaaaaattttacaaaatattttagcaaagtactttttaaaactttaatttttaacttaatgtaattttcaggtaaaaggataatatattcagtgcattttaatggcatgagtttttaattaatgttgtatagtcgaagacatagtagtatgttagtttatatattttctagaataacatatttcagtttaaatatgtatttatttttgaatttaaaatattcatgtttgaatggttaaatgagaatgtacccttatttctgtggaaatatagcttttattaacagcaaatataaatatatctaattgagaaagtaattgaattgttccccccccttttttaattaaatgaatatcctttgagaatttaggagctagctacttaggggaccagaagctacttacctgggcacttaatattattaacctggtatatggatcacattgacatccagaaagtaaaaaatattctcaaagaagcaataatagacataacagaggatttgtatcataattcacgcagttactttcagatttttctcttttgcaaaatagaaatagtttctagttgtgaggtttagaaatcctatgtaatgtattactcttggtaccgagaagatgctcaataaatagtagctattgtttttaagggaaatccttaagcatggtctatatagattaggctcattttaacaagttatttgaattgtcagtctgtggacaactagaaacaacaaattcatccactgggagtaattttatattagattgtagggaactttatatttgtccattttcacactgctgtaaagatacgagactgggtaattaataaaggaaagaggttttattgactcacagttccacatggccagagaggcctcaggaaacttacattcatggtagaagggaaagcagacatcttcttcacaaggtgacaggagagagtgtgagcacatgaaggaagaactgtcaaacacttataaaactgtcagatctcgtgagaactcagtcactgttatgagaacagcatggggaaaacctctcccatgatccaatcacttcccactgggtccctccctcaacacgtggggattatggcaatacaattcaagacaagatttgagtggggacacagccagaccatatcaaatatatttatattcatatcctcaggatcatcaagaataaaaagatataaaagtgaatggggacattttagaaagttattcaccaaaactttaataattataaaaagtggcttttatctcagaataaccctatgtagtaagaatactgaggcttagagaagataagatcacacatttaatggcagaattttgaatgatgcaaactccatcagtctgattctaggccctctgctcataagcaccatattataccatttccctaacacagtgaggaaaattttcttttaaaaattatgtacttaaaactcatcaaatctgaaggaccttagaagatctatctacctacctatcaagtttgtagagtattacatagctttttctatgtgtcaggcactgttatcaatcctataacaactcatttaatctttacaactctttgaggtgggaaccatgattgttcttattttatacaagaggtaactgaggcatagattaagtaacttgtccaaagccacacagttaaaaagtaggcaagctaggacttgaacccaaacagtgactctagagtgttgttaaccgtgccatattgactgcctttctaaaaatttgtgaagtttttacttcatttagttttctccttattataatcttttcaatgataagaaactcattacgctgtaaggctatgtgccagtcagagttacaccagagaaacagaaccagtaggatatatcggaagagatatattgcaagaaattgacttattgattgtggtggctggctaggtaagtctaaaatctatagggcaatctgcaatgaagggcaagctggacctctcaatcacaggctgaagctgtactttacaggctgagtttcttcttctgggaagcttcagttctgctcttaagggctttcaactgattgagtcagatccacccaaattatctatggtaatctcctttacttgaagtaaactgactgtggactttagtcacatctacaaaataccttcacagcaacacctagatcagtgttgaataactaacgactataccctagccaagttgacacataaaaatgtcctgtaggcatattttttccttaagccctgacaggtttgggggttggtggttcattttcccaagccagaaatggaacttcctactttctttttaacttacatttattactcattcttatcacctcctcatctcccattaccacagccaaaaaagatttcaggtgtttttcaatagaaggcatatataacctttaaagcaaaattataaatacaagagccttgaaatcaaaggcaagaagatggttgaaccaataaaccgatgttgaagctagttactgtatttgagcataaaatttagcactacatggtgaggatacagtataaagccactttcctagtgccaaattgtaacaggaatttaatctatctaaatacagggagcagtgatttacataataaatgagataattattatttaataaagatttagagaattctctagattcctgtgttcaagaaggagggcctcaaagctgcctgcagttatatttttatgataattatttattactatctcatgacttaaaaattttcttaacaagtaaaataactaccttttaaaaaatactgtaagaccctttgctatgacctcagataatttaaagtgatgtctcacagacctttatttagactgaaaggcttataaaaattttgtgtgtgcctgtaatcccagcactttgggaggccgaggtgggcagatcacgaggtcaggagttcaagaccagcctggccaatgtggtgaaaccccatctctactaaaaaaaaaaaaaaatacaaaactacaaaaattagctgggcgtggtgttgggcacctgtagtcccagctgcttgggaggctaaggtaggagaatcgcttgaatctgggaggcggaggttgtagtcaaccgagattgcgccactgcactccagcctaggcgacagagcgagactccatctcaaaaaaaataaaaaatgaaaacaaaaatgcaaaaagagaatcttgtgtgtggctcacgttactctaaattagacagttggggtttttagaaatcttaaggacttgtcccatagcagtcttatgtgaggcccaaggtagagaaagccctctccaaagggaatgtggatgtggctttttgtctcttggaatatattagaatttgataatatgagaaacccacagagttttaaaagaaattgtattaatgttgattgaaagggtcagagataattaataaggaaaaaagtgtacgggccctcacctactgtggaaaggaagcaggctgaaaagctactcacctcttcacataggccatttcatgtgaaagaatgattgagagagggcagccaagaagccagagagtacagctaagagacaaggagaactactctcaggactaatcaaggaatgagtgacatgtgcccaactggactttagaattgctattgatgagggagtgtttatacctcttgttttccctctttttgaatgggagtatccattgcaatttctattcctatctcaccatcgtgtattgggcagataacttgtctctttagttcacaagtctttagattaagagaaactaagtatgaggagttgcactcaggaaactggatctgagaggcctcatctatacctgcatttgatttagattacatcctggaccttaggataaggcttcttggggtcttggaaggagtaaagtatattttgaaaatggaggagtattctgtgacaaagtgaagatggctacaaattcttaaccacccttttcatctagaagcatagcatatttcttcattccactgaatctgggctgggtttctcattgctttaaccagtataatatggtggatgtgatgctagatccgttacagggttgaggctctgtcctcttttaagcgaactgctatgcaagaagtctgactattctgagaccaacatgctgttcaaagcccaactagccacttagagagaaagagacagagagatggggtgtgggggtggggggtagagaaagaaagagagagattggtagcactagataaggtgaattatttcatgggccttttagtcagcccagccttcagctgaagacagatgagagagtgactcagcaaacagtgtgaagtgagccagcagacctatgacctcatttgggctgttccagcttctcgcagctgttgagccacccagcttagaccccagacattgtggtatagagatgaacagttcctactgtgtgttgcccaaattcttgacccagaaaattgtgagcaaaatatggtgattgtttgaaaactaagtttgttacataacacagataactgaaacacaagtagaaaaattctatcacctgcccaacctcacagagccagtaagaactagtgttctccccttcccttttatttttagttgacacataataattgtacatatttataggatacagagtaatattttgatacatatgtaatgtgtaatgatcaaatcagggtaattagtatttccttaccataaacatttatcatttctttgtgttaggaacatttaaatcctctcttgtacttgaaaatgtacagtaaattattgtaaattatagtcaccatacagtgctatggagcactagaccttacttttcctatctagctgtgattttttatcagttaacctctctctaatctgtagtaacccacaattatctaattctcttcccaacttttaataaccacaattctcctatctacttgtatgagctccacttttaaaagctccctcatatgggtgagaacatatggtatttttctttctgtacctgactgatttcacttaacataacatcctctaggctcatccatgttgccacaaataacaggatttcattctttgttatgtctaaatagtaggtcattgtttatatacatatatatacactttctttttctgttaatctgttgatagatgtttaggttgattccatatcttgattattgtgaatagtgctgcaataaacatggggtgcagatgtctcttcaatatactgatttccttccgtttgcattaatagccagcattgggattgctggattatatcttctatttttagttttttgaggaagcttccatactgttccataatggctgtactaatttacattctcactaaaagtatatgagagttccctttctctgcatccaaaaagactattgtctttttaacaatagtcattcaaaccgaggtgagatggctttcatttgcatctccctcatgattagtgatgttgagcattttttcatatacctgtggccatttgtatgtagaaccaatgcttttaatcacatgtcaaactgcctatgtcccagtcctttccagagagccctctggaaccctttttctattgtaaacaaatttatttaaacctacaggttttccatggaatagaagtttattcctcagtaccttgcatctactagttgggcagttatggtgagcatatctttttgacttaattctagagtaattatataattggagataaagctgggaaccattctttacttaaaaagtctcaagtgggactctccttggagtgttctctaaaaacaaaacaaaaaaaatcgttttcttaaaggcatttagttagcagagcacagctgactgaaaatttcttaaatacaattcaggatagtttgtataaataaccaaaaggtaaataaccaatgtagtcctcatgagacattaaaattttttttcaactgaatctctcactgcactgttaattggaagtcttctttcttgaccattctctagaacagaatacaactgcggtcactcctctcttctggatgtttttttctggaccatccaattcatttccacccccttgttatggagagaaactttcctctttcatggaaaagtcattctgacatcgaggcaccacgacttttgacctagagtaagcatatcaaactatttttctcaactcaataatttacagaaaaatattaagaaggtgaaaattttccattcatcattacctacatgtaagaaaaaaagaaaagaagaaaaatctaccagaatcctagcatttacagataaccactgttagcatttatttatttatttatttatttatttatttatttatttatttatttactgagacagggtctccttctgtcacccaggctggagtgcagtggtacgatcacagctcactgcaacctccacctcccggattcaagtgattctcctgcctcagcctcttgagtagctgggattacaggtgcacgccaccacagcccagctaatttttgttctttttaggagagatgggattttgacgtattggtcaggctgatctcgaactcctgacctcaggagatccacctgcctgggcctcccaaagtgctgggattataggtgtaagccactacacccagcttgttagcattttttgaatactgttggctttctatatccacagattcaaacaatcaaggattcaaccagccatgaatcaaaaatgttgaatcaacaaaacaataataaaaaataaagtagaaataataataactatttacattacagtataataggtattataagtaatctagagattatttaaagtatacaggaagatgtgcataggctatatacaaatactatgccatttgacataagggacttgagcattcatgtattttgatatccagaggcgccctggaaccaatctcccatggataccaaggggtgattgtatatcctgtttaaaagtatatgggtgagtttcctcctagtcaacatagtgttggaagtcctggccagaacaatcaggcaagagaaagataaaaggcattcaaataggaagaggggaagtcacattatccctgtttgcagatgacatgattctatatctagaaaactccatagtctgcccagaagctccctgatctgatacacaacttcaacgaagtttcaggatacaaataaatatacaaaagtcagtagcattgctatacactaacagcacccaagctgagagccgaatcaggaatataatctcattcccaattcccacaaaaaaggttaaaatagctaggaatacagctaaccaaggtcaaagagctctacaatgaaaattacagaacactgctgaaagaaatcagagatgacacagacaagtggaagagcactccatgctcttagataggaagaatcaatatggttaaaatggccatactgcctaaagcaatttacagattcaatgctatttctatcaaactaccaattacattcttcacagaactagaaaatactattctaccattcatatgaaaccaaaaaagagcccaaatagccaaggcaatcctaagcaaaaagaacaaagctggaagaatcacattgcctgacttcaaactgtactataaggctacagtaaccaaaacagcatagtactggtataaaaacagacacatggaccaatggaacagaatagagagcccagaaatgaagccacacacccaggaggagggagaggttcagaagagaaagataaaaaggaaaacaaatgaacaaacaaaaaaaccaaacctgttgagtagtatgcttagtacctgggtgacaaaataatctgtacaccacacccccaagtcacaagtttacctatataacaaacctacagatatgcccccgaacctaaaataaaagttaaaatatattttaaaacatatataaaatggatatatgtgtcagttttaaccaactgatgtttgacaaggctgattaaacaagcaatggagaaaggactccctgttcaataaatggttctgggataattggctagctgtatgcagaagactgaaactggaccccttccttataccatatgcaaaaatcaacccaaaatgaattaaagacctaaatggagaacctaaaactgtaaagcccatggaagataacctaggaaataccattttggacataagaacgggcaaaaatttcataacgaaaatggcacaagcaatttcaacaatagcaaaagttgacagatgggacctgtttaaagagcttttgcatagcaaaagaaactatcaacagaataaacaaacaacctacaaaaatattttcaaactatgcatctgactaatgtatagttagtctgggtctaatatccagaatctacagggaacttaaacaaatgtacaaacaaaaagcaaacagccctattaaaatgtgcacaatggacatgagcagacacttttcaaaagaagacatacatgcggccaacaaacatgaaaaaaatgctcaatatgactaatcattagagaaatgcaaatcaaaaccacaagataccatctcacaccagtcagaatggctattattaaagagtaaaaaaataacatgctgacaagcttgcagagaaaagggagcacttacacagctggtggagtgtaaattagttcaaccattgtggaaagcagtgtggaaattcctcaaagatctaaaaacagacctaccattggacccagcaatcccaccaggtatatatcctgaggaatagaaatcattctaccataaagacacattcacttgtttattcattgcagcactattcacaatagcacagacatggagtcaacctaaatgtccatcaatggtagactggataaagaaaatgtacatatacaccatggaatactatgcagtcatgaaaaagagtgagatcctgtcctttgcgggaacatgggtggaactggaggccattaactctagtaaactaacaaaggagcagaaaaccaactatcacatgttctcacttataagtgggagctaaataatgaaaacacatggacagaaagatgggaacaatagacactaggatatacttgagggtggaaggcgggaggagggacaggttcagaagaaaaagaagaaaagaaaaagaaaaactattgggtatacctgggtgatgaaaaaatctgtatgccaaacccctgagtcacaagtttccctatataaccaacttgcacatgtacccctgaacctaaaataaaaattaaaatactaaaaaaaagtgagttttaacaaattgagattataataataatatagtgcttattgtataccagacaccattataagtgctttaatctgtttatttaatccacccgaagaccctccaataaggagtgtacttttattaacctcatttgcagatgagaaactgatgcccatagttgttaagtaatgtgcccaagatcacataactgggattcacattcagatagtcttgatttaagaacctgccctagtaaccattattctaacctgctatccatattatatattctgacaaaatttgcttttttcatttttgaatttttctttgcatttggataatcttctgtaaggaatttgtcgtacagtcagtatgttaaatgtattaaaaaataagtgtatggaactaattttttatttccccaattcaagggtaaccattctctctactttgacaggattgattacatttgcctcttttataaatgtaatcacacaacatgtactcaataagtactcttttgtccctggtttctttttgcctgacaatttgtttgtgggattcattcctcttgttaggtatagttggaaattgttcattttctttgctgtataatgttccattgtgtgaatatgtcacagtttaaatgttctactattgatgggatgtgatgtttcctttttgggcctactgtaaataatgctactataaacattccagtacacacattttggcgaacatatgtatgcatttctattgagtatatatatctaggagtaggcattcagctttagtagatactgtcaaatatttttctaaaatggttgtatgaatttgcactactagcattgcatgagggttctcattatttcacattctcatcaacttttggtttttcctttcacttttgctttagccattctgatgaatgttagagtagcatttttatgactatatagtgttctattatatgcatatgtactgtcttttatagacgggagtccctattgttgtgcatttagattgtttccaatctttctttgaaaaaatacaaacagtatttacactaataggtttgtagacgtactttaagtcttgtgatagatgttcccatacacgattgaaaaataacaagtgtgtttccctgaaacattatgaaaatgagttacaatttttgcaacttcatccagttactaagcaaaagatagcctctcatatttttactttaaattttttttatttccagagaaagttgagcattatgtttattgctaatttttatattggtaatttgtatatatttaataaatcacctagtctcattttatgctcatatttctattgaagtatatgtgaatatcttagacccttttattaacccttttctgattatatatgttataaactttccttatttgtctttcaattttataaaaaattaactttttatatagtcaagtatatgttttatggcttttgcctttggtatcatgctttaaaaggcctactcatactttcagctttttcattctgctctgttcttccccaaagtgcatgtgtatgtgtatgtgtgcatatatacatgtatgtctattcagattttcccataaaaacatgatacagatagccctccatatccttggattcaaacaaccaagagaattcaaccagccatgtatcaaaaatattaaaacaacaaaacagtaaaagataacaatacaacaatatgaaataatacaaataaaaaacaatacagtataacaactatttacatagcatttacagtgtattaggtattataaataatctagagatgatttaaagtatatgggaagatgtgcataggctatatgtgtgacagtgtatgtatgtttacatatatatatatgtaagtatatatatatacttgagtttttcccataatgttcaatttcctctggaaagaaaatgtaaacttgcttcctctatgctgtatcatcatcttattctcaaattcccttcaaaaccaaactttttaattagtagggtaacacactgcttccattttcttactttgtgtttacgcctcaaatcctctgaggctgatatctattccttcctgccgtggcaaaagtcatcaataatttgttgtgagttttttcccttactctatagtagagtttccctaatctatagtgttttccccaagtgacttattcactaattacttcatgttctgtcagttccaattactttctatctttgtgacaacatatatctcttctgtgctctgagtgtaatttttgctggatatgaaccctgcaaagtcaaattggggaaattatcgtttcctgaatctgcacttcctattttggtgaaaatgatgcacctctttagtcatataagccagaattttgggtgtcatcttagattctttaattttccttgtcttctacctctccttgttgactgagtcttaggaatttgtcccttcatttctaatttcactgattctagcttagttcaggtctttatcaccctttttgaggatatctacaacagtttcttagccattctccctgccttcaatttccctagtcgatcttccaaatctaatctaactccctgcttaaaattatctttatggtgctccattgcatataagataaaatctattcttagcctgacatataagatgatttggcccctttatcttgtttcattttttccctatcacttcttaaagtactttttaaggcacaataagactttgttattactatgattgcaccaacattgctactgacttcaacacccaaaatttttgtatacagaagcgtgccccaaacacaaaatgagtctttctgtactgctagctaatgtttactaagatcttacaaattacttcttttattagtttggaaaaaatatggggttagttcaatgctaaatcaaaattgttcctctcttttctgcttaagataatctatagtaataccttatattagtatggattattaaagatttactgtacataatccttccattatttgattttatagaaacatctcaaaggaattaacccaagggtaaaatactacccatacataatttccaacattttgatcagattctactgggtaagtatatgtatattttaagctataattcctataatctgtgcaacaaacccccgtgacacaagtttacctatattacaaacctgcacatgtacccctgaacttaaaagttaaaaaaaaaagtatatgtccatgccatagaagacaaagaaacaccgtagaaattttctaggttaaaggcagagtaaaagacataacaactaaatgcaagacctgatatatatatatgactgcaaaagcatctctactgaccccagagaatggtgtggcaactattgtttacaatttttatttagtatttatttctaatataagattgggaaaatagcatcaaaatacagctgcttagtagtcaagaagactaattatgtccctggaaataattacaactgtgtacttcaccttcaggccagagtttacttattatattaataagaaaccaatactgcaattgagtcttgtgagcctaactcaaagacacaagattaaatgattagttttacagaatgagaatatagtgatgcagtaatgtatatccattggtgacattgccattagcattggaggcaagtgtccatttcataatagatggtgtcctaagttggactgcttctttttttttttttttttttttgtttgatacggaatctcactctgtctcccaggccggagtgcagtggtgcaatctcagctcactgcaacctccacttcctgggttcaagcaattctgctgcctcagcctcccaagtagctaggattacaggcatgcaccacaacacctggctgatttttgtatttcttttcagtagagatgggatttcaccatgttggccaggctggtctcgaactcctgaccacaagtgatccacctgcctcggcctcccaaagtgctaggattacaggcgtgagccaacatacctggccgtactttttaactatgtcttgcctcatttggttcctggctaaatctggcttttcagtcttctcatccattccatatgtactcaatctaataaattcattttctgcttaaattgactagcatcaatttttaatttacatttttgcaactgacaacccagactagtacaggtcctaaaggggactctaattcacatgtcctcccaagaaaggcaggtagcaaggtatcttatttgtatgtgtctgatagggctcccaagaaaccagtggaaggtactcttaggattgatagttaaagtcttaggcacagtaatcaaggaacctaagaccgagtgacagaggaatgtttttacatgggagaactctgagatacagtgttagaaattccctaaggaggttagtaggaaatattttccaagaataaaactgacagaggattaatatccagaataaagagcattttataagtcaacataaagagactaaaaatgaaatagaaaaacatagcaaaggatataaatggataaattactaaatatgaaatttagatgatcaattaacatatgaaaatattttatttcactagtgatcagtgaaatatgatttaaaatgaggtaccttttttaattcaccagattagcaaagatgaacaagtcacgtagtatcacatatgacaagcatgtcaaatgtaaattgggatagccattcctgagacaatttggttgtatcagttaaaatgaaaatgggcataaactgtgacccaggaattccactgttaagtatcttctgagtagaaacacttatacatgttcaaaaggaagtatgtatcaaaaaaagacatactggtgaggatgcaaaggcatgggagccctcagacattgctggtggaaatataaaatggtacaggtgctttggaaacagtttttcagtttcttaaaatgttaagcatcagattgccatacccagcaatgtgcacttctagaaaaatagccaagagagctaaaaacactcctccacacaataatttgtacttgaatattcatagcatcattattcttagttgctatacagtggcaacaattggtgagtaaagagaatattgtttatccatacaattcaatactattcaacaataaaaaagaacaaggaatcaatacatgctgcaacatgataaaccgcaaaaacatgctaatgaaagaggtgagacacaaaagaccacacattgtgtgatttcatttatatgaaaaggaaaggcaaatctgtagatacagaaagtagactgatgcttgctcagggataggggtgagaatggaaaatgaccacaaatgggactgaggctccttttttgggatgatgagaaaaatgatacagtattaaattatggcaaccatttcacaacttattaaaaatcaccgaattttacatttaaaactggcgaaatttgtggtacataagttatctcaagaaaactgttaaaatgattaatagctagggactttataaacattactgtaacctgggatggtagaccaacacttgtaggaaggatagctggaagaaatcaggcatgtcatgttaggagaaacaaaatggaaacagaaagaaacagacatgaacatgatgtccattattgaattatttgtaatactggaaactagaaataacctaaaagcccatcagtaaagaaacaggtaaaatatagtacatttgaaaaaagtaattttcaaaatatgtagagcatgataccatccaggcaaattagaaaagtaaagctgtatatgttttccacataaacatgtatgtaaaagtataaaaaagacatttgaaggttataagcaatttcagaacagtggttgtttctaagggcagagaaggagaatcaggatgtggatagtaatcaggagggcctttagtgttatttgtagtgttcttttttttttatttttacaaatgtatggtgtaacatgaattttattacatgtatgtaatttatagtgatgaagttagggtatttagagtgtcagtcacccaagtacaatatacttttgcttacttaccctattctgctatcaaacattgaatatattccattttactgtatggttgtaccctttaattcacttctcttcagcctcaccgtccccctccctgctccgtcctagtcagccttcccagtctctgctatctatctttccattctcttccttcatgggatcaaatattttagctcccacatataaatgagaacatgtgatatttgtctttttgtgtctggcttatttcagtttaaataatgacctccagttctagccatattgctgcaaatgacaagatttcatttttttatggccaagtaatattgcattctgcatatatgccacatattctttatccatttataaactggtgaacatttagtttgattccatatctttgctattgcgaatagtgctgcagtaaacacacaagtgcagatattctttgatacactgtcttcttttcctttgggtagatactcagtagtgggattgctggatcatatgatagttctgattttaggttttcgagaaatctccataccattttccatagtggcagtactaatttacattcttacaaaaatgtataagaattcccttttctccacatccttgccaatatctgctactttttttttttttaatgatagccattctgactggagtaaggtgttacctagttaaggttttgatttgaatttctctgatgattagtgatgttgagcatttttcataaacctgttggctgtcttcttttgcaaaatgtctactcatgtcatttacctgctttttaatgggattatgtttttcctattaagttttttgagtttcttgtatatgctggatattagtcccctgttgcatgagtagcatgcaggtattttctcctattgaaaaggttgtctcttcaccctgttgattattttttttttctgtgcagaagctttttagtttaattaagtttcatttgtctattggtgtttttgttgcctgtatttttgaggtcttagttgtaaattctttgcctaggccaggtgcggtggctcacgcctataatctcagcactttgggaggccaaggtgggcagatcacctgaggttgggagttcaagaccagcctgaccaacatggagaaaccctttctctactaaaaatataaaattagctgggcgtggtggtgcatgcctgtaatcctagctacttgagaggctgaggcaggacaatctcttgaacccaggaggtggaggttgtggtgagccgagatcgtgccattgcactccagcctgggcaacaagagagaaaaaactcttgtctcaaaaaaaaaaaaaaaaaaaaaaaaaaaaaaaaattctttgcctagagcaatgtccaggagagtttttcctaggttttcttctagtatttttataatttgtggtcttacatagtctgtaatccattttgagttgatgtttctatgtggggagaaatagggttctagtttcattctgcatgtggctattcagttttcccaggaccatttattgaagagagtgtcttttccccagtggaagctcttgtcaggtttgtcaaagatcaattggctgtaaatatgtggctttatttctaggttctctatttagttccattatgtgtctttttttataccaatactgtgctgtttgggttattatagccttctaatatactttgaaatcaggtaatgtgatgcctccagcttcgttctttttgctcagagttgctttggctatttgggctccttttaggttgcacatgaattttagaattattttttctaattctgtgaagaatgatgttagtattttgatatgattatgttgagtctgtagattgctttgggaagtatggtcatttttaacagtactaattctaattcatgagcatggacttttttcatcttcaatttcttttatttgtgctttatagttttaaatgcagagctctttcaccttcttggataaatttattcctaggtattctttttgtagctattttaaatatgattggctttatttctttctcagctagatcattattggtgtatagaaatgctactgatttctgtatgttgattttgtctcctgcaactctactgaattcatccatcaaatcagggagtttttggtgaagtctttggtttttctaggtataagatcatatcatcagcaaagagggacaatttgacttcctcttctccaatttcgatgccttttatttctttctcttgcctgtttcctctggctaggacttcctgcactgtgtcgaataatagtagttaaagtgggcatcctggtcttgttctatttcttagaggaaaggttttcaacttttccccatttagtatgttgttagctgtgggtttggcatgtatggcctttattattttgagatatgttccttttatgcctagtttgttgagttttgttatgaagggatgttgagttttttttttcagatgtcttttctgcatccattgagataataatgattttttctgttgatgtggtgcatcccatttattgatttgcatatgttgaaccattcttgcattcccggaatgaatcccacttgattgtagcttattatctttttgatgtgctattggatttggtttagtagtattttgttgaggatttttgtgtctgttcagcagggatgttgacctgtagttttctttttttgttctttgtcaggttttggtatcagattggtgctgaccttgtagaatgagttagggagaattccttcctctttgatcttttggaatagcttcaggaagattggtattagttatccttagtacatttggtagaattcggctgtaaatccatccagcctttgtcttttctttattgagatactttttattactgattcaatctctctgcttgttattgaactattcagattttctatttcttcctgatttcatgttagtaagttgtatgtttccaggaatttatccattttctctagcttttccagtttgtcagcatttagttgttcataatagtctctgatgatcttttgtatttttgtgatatcagttgtaatgtctgctttttcatttctgattttatttgcatcttcgcttttcttggttagtatagctagcagtttatcaattttgtttgtcttttcaaagaactaaacttttgttgatcgtttatgttgtttttaaagcctctatttcatttaattctgctctgactttgtttcttttcttcagctaatttggagtttaatttgttcttgcttttctattttcttgaagtatattgttatatgttaatttgtaatctttctacttttttgataatgagcatttattgctgcaaaacttcccatgatgactgtgctcccaaaatggcaccttgctgcagctgttcatgcttaggtggagtgagtgagccagcatgaattccttgtctgatgcaatgccttcacacaatctccaagtcaccaaccatgctagtttcagcattcctgttggtaaaggagttctactgaggtttagttcacagcagtccatggtagagatgtgaactgctaaagttctgtcacttatgctgtccctgtaatatggagcccttctaggctcccacccaatcttgaccaagcgggccacttgcttccttttccttctgtgcctcaaatgttccctgtgtgttctccattgtactctagtgttctttcctagatgttctatttatagtatgattatctattcataattgtggttcttctttctggagagagcaggtgtctcacatctctagtcagccatcttgtaccaaaatcccattatttgtaattttctaaatagataatagataatatattcaaaatgtatacattttaacattacagacagaaatatggacttgaagcaaatattccaaaatatcaataatagtatttctgggtgctgggaataagagtgacaaaagaaaaaatctaagaaacaaatataaaacagccatcattctctttggttacctaatataaagcttaaagtgaagaagaaagcctggaaaatggcattgcagacctgagaacagcagaaagagtgaaataacagctccccaccaaggacactgacctttgaaacacagcatcagtgactacagtaggaaaacctaggactctgcttggaaacagaggggacttaaggatcacttataataatatttacttcttcagttgaggaaggtgggaagtcatttctgttgttacctagcagctcttagagatgagtttatataccaaaagtagttgacatatgtatcaaaagtaggataatctaagaaatactcttgtttttggaatatatatttaatgagtttcagttgcaagaagcagagaccctattcaaactgattgaaacagaaaggaaataattttttaaggtaacttcaaagttcaagtggtgaaacagcatttaggcattgcagtatccaggacctcaaatgatgtcattagatttatatatttttctccctctttctgtgtttgtctctctgcctctgccatgtctttctctgtcttacagtatgaatatgatttttttcattgttcagaagctggagctggaagtgactgaaatacttctgagaaaccttatttccatgaccatgcttgtcatcagaaatacatattcaaatatcatagaagagcatctagtggggagaactttatttttatccaaaactttaagaacaaggagtccaggaaatatattttatagctttccaacctgtccaactattaaagaaggagaatggaagggacattgaatgaaccaatttacaatatccagcatggtccactcttttggctgttcatcacctatttatacccttctactgatgctttcaaagaatggcaattacactattctacagctaacttaatgctactgtccttcatataaatgaaaacactcaacttctacccaaaaagagagatctaaaaatccatcagcccgtatatcaatttctagatgatattcactcatatcatttagccataatatcaccttgactttccacagccctagtactaaattataaagttaatgaccacgccttatgtaaaattcctggggaaaggcaagaaggaaattgatgtgtttatatgtacacacatacataggcacacatatagcatagcaaggtggcatttatgagtagctgctatagtccttgttctgtttgaaagttgctataaatttcccactgcagcatataagtgtagaagggattctttttcagggtagtagtttagaccatcattcttgaatcattgagaccttggtagtgtttcctatattggaatactgaagtcttctctgtttttatactcaatatgcaaattacaagaaagtaccccacctccatctataacacaactttatgtctcagtaataaccaggattaatcactcaaacagaagtaactttccttttcggcctgtatttttcagtgaaatgtgaccagaatgcccagctggcactctaaacttctggttcaagggattaattgttacaggtactccccatacttgaagagtacttctaaattcatatttcttgaagagtacttccaagggtattaaaatgtctcaactgttaaagagtccaaagttacagagacaagaagtagaaaattttcaaatgggtaacttatcatactatagttcattaattttgacatacatacttttgtctcacattttagtgtattcgaaattaggatgcttcctaaaatgatgacatcagtcaggcaattcttgtgatgtgcttgttattgtctatacatgcacaaacatgaaaatgcgtatcagcaggttggaagaaaatataggagatggtagtagagcgcctcaaaaaatactgtatcaatatttttgatataaagaacaataattgtgtaaaaacacacaataatgactgtgcatcaaaaaatagtctggaagagtcagactatgaatatgaaagcattttaggaatttcttaacaagtttaaaatttttttcacttcatatgtttacaagagtgatattaaaaagttatgtctaaataaatcaaaaatagttctctcttaatagggaaaaaatttataactgacaaagtatctcatagtttaattgctgtacatttttcttttttttcttagtggtacatgatataatggtgatttttataattgatagtcatagattcagtgaaatagggtggtgatatctaccactcccacctccaccttctggttcccagatacttgttttttatggttgaagaaacaccaggtaatggtccctgagaagtttcttttgtgtatgagctacaagatttcaagacttttcaaatcttgatcttaggtaatttttgaagtaacaataatcactaatagtttgtctttaatgttcttgtactagctatcacgagttttatgtatctttgttattgttactattttgtgtcaattgccaagagacttaaacatcttttctaacatgttcatattctcttgattaattacattatgaaacaacatgcctattcattatttttatttggaatttttccttttttcatgatttagtgtatttgttacaaaaaataacttgaattcacttttctatataggaacatttttattgattttatgtctcctctttataatctctttcatatttcattatgtttcttctaaatttatcttgtttttttaatacataaatttgaagatgaaaaaggaggtactcctcatatacattcatgtattatacatatatattcatatacatatatatgtacacattcaaatcacaagtctgtcatttttaactttttaattgaaaaatccccaaacttcttgccaatcgtagctaaaactgtacattacccctaaactttcccttattcagatctctaaaatgcctggtgccactccattagcacctgacataatggaaagtgtgaagaaggggaagttggagagaaaagagacagcaatctcaaccaattgctattaaaatatcttacttttgcaagtcttacaaaagcatgtgtccttgtgaacacaatgctagaatctctcccagggtattagaagggttgcctgcacttgagaggtcctgaaatttaatctctgttagcttcacagtaaacctgctgtggccctcagatttcagttctctttgtgagagaagccctctcctctggctggcaatttatgattcccttgcacacactctcttttctggggtctataggacataaatgtattttccctgctattccaagttgagccccctctcaacataattcttttcactctgccactgagcagaggtggttttatctaccatttagtacctttacattttgtacatttggtgagtccccccaaaacagtccctaactcttataaatcctagcagatagggtacatgttaagtctctgagtggtttccttgaagcccctcagttgatttgaggtaagggtgacctcctgccctgaatgtgttgcatacctcataactgctccaaaacaattctctccagcactcttcagcctctccctctgatgtaaattggctaatgttggcagatctggctttaaaatctagtttctgtgggtggttttatttttcatttgggaaggctggtcacctgatagaaaaataaaaataaccatgttaagacaaattggtgttttagctgtctgcttaattgcttttggccttcagttttctctttgaaatcttatactcaattgagcaaatgtttctcagttgagggtttatgtgttctaagtcctgtgataggtaccaggaatgcagagataaacagatccattgtaaacagtcaaatgtaatagaagaatcatatggctaatctgccatatattaagtcatagtgtctaaattgcattaaaccagctcaatataagaacaactgttttcttaaaagttatatgagattttataaaagattttaccttgccattatatagtaattatgattgaacttaccaaattaaatgtaatgtgacgtttactagtatttttccattaaattgttagtgaattaaaaggacgttttggaattatatgggggatctttggaagacttaattttttcatgggttgtataaatagatttatgagagggaaaatggatattagtttctgatatggtagtttatgtgagaattttatagtttgatttgtataaataaaataatgttattgcatatttctggtacattacacttttatttgtataataacctaaacttgtgtttatcttatattgctaaaatttaaggtaatgacaataaaagatttttctggtatgtatgtgaagcctaaatggccccattctgccaccttctggctgactccgtagcttataatattgtgaggtaagtgtcatctaaccgttctgccatggttggcagcagaccatatatttggggcctgggtgatttaaaacagggtcagtttaagcaataatgtagttctagtgcctcaggctcacctttatttcatagttctaaaatgtgttagaatttattggaatagaataccacatagtgatgtatgagattgtttctcccagggtatggagttgtagttaattttgacttttctgcaatactaaagtttcttcagatattacttgataattaaaactgtatcaacatggtaagctatttatcagaatcatcataagaaagttacttggagagtgatatagaaatgaaagttactgaaatcagcaccaattccttatagagaaactaatgggttcagtaatcacttactagagttctaaaataaaaggagaaaccatatgtacaacaacaaagtactaacaaaatcttagtaatttaaacctctagttttgtgacacttctatatattgccatttattaaaaaaaagaatttgggaaggcttaaaacttttggaaatgtaattcatttaaaattggtttgataaactttttggagagggatagagaaaataaagtagaacgctataaaatgttgcaatttgtgaccttttgcagcacacttaacctctttgtcactctggaaaatgggataataatatccaatataaaggtagattgttgtgaggaataaatgctttatttacttcatgtgaaacacttagaatgatatctgacatataataagttagcattgttatagtcaatcttacaacatttagaatatgttacatagtctaatataaatggattccaaaatattctaggcagtaagctttgtattttcttaacatttttacactcaataatattaaattaaaagagagaaattgaagactggaaatgcatagctccctaaagtagtgtagaaatatatgtgatatattggggcctaataaagggcctttatttctgtctgtgactcatcttttagatacctaaagctatctcataaaaaagctatggtatcttgaagaaattaatcaatttaaaaacatttattgagtgtatactgtgtgatcatcagtgtgttagattctggtaagaaatgatatgagaaactcacaaaaagaagtataaacatgcaattactacaatgtggtcagtacagtaacgtgggtgttaatatattttaggaactagaagagaagaaataacattgaactacactttgattaacaagtaggaattagctaggagaaagtcgtcttacataaatggaacttctatgcatgatttttgactactggtttacctgaagtttcttacattttgtattagtataactttacagcctttcatatccagaatgcttttacacacattatctgaagagtgaggttttcaggttattatctgaatggtgaaaattgggtttctatcgtagtaattatgggtgaaggggaaatatgtgttttttaaaactggacatttgtaatgttgctgtctgagcctatagccccctaccttcacctctttatgctgtggagtcaggcaactacactagcagtcaaatgcctgaggttcgcagtttgccctatcagtgctcttgagggttctcatgtgagtgaaaggagtgactatcccatgccctgcaccatttctgtggtggtagtggtggttgagggaagaagtttcatcttcacatttcaggtatttagaaagcccatctggagatttagttatgggactacctggctatagtcttggctagggcgttagtagatcaatgaaattttctcatcaacacgaagggctctaagtgttaaagggagacagtgcccacatcaaccatgactaggagtttcacatgtccatatttcatacattttagtactctggaaatagaatcccactttcctcatccccatcaccttattacatttaagtcttgtgttaattttctattattgctataactaaatagtggcttaaatagtggcttaaaataacacccatttattatctcactgttctgtaggtcagaattctggcaggctcttatctggagtttctggggaagaatttacttccaagctgatccatacttctggcagaatccagtaccttatggttataggactagggtctctgtttcttggttgactgtcatctagggggctcccttagctcttagagccctctctctggtgcttctacataggctgtaatatctcagagccagtaatggtgtgctgatcattctcacacgtgaaatttcatgacatgttgccatggctctcttctgctcctagctggacaaggttctctgctttcaagagcaaatttttttagatcgggcccacctaagtaatccagaggaatctatttagtcactaattagtagccttaattacatccgcagagtccagttaggcatatattgaaacatatccacagtttccaggcagtagatggaattaatagggggagcattctgcttatcagaaatccatcgggagtttagaaagaagaggaagtacagagagcctacgacctttggtatgcatttcaagactcagtcacaattaagaggaggatctacttaatagttaaagaaaatttaaaccatctttcttccctaatacaaccagaagtataaactagttgttaacagatatgcatatgattaaaataaaatttagaaggcagtgatgtgtttcagactcatattcagctatctttttgaaatctccatttgtatgtctagtaagcatctcaaatttaatatgtccaatagaattttttattacaacacccctccagccccttccttcagaaatgggatagttcccttgaccccttcgcgggactcacaaagggattgacttgtttactcagctcgcagctctcatcccctcacgggacggggagcatgcaggtgagtgggtacagggactgggacaagtgcttctgggcatccgcaggagtagaatcctgtgcagtccagtggaagcttcctggggggtgggggggaggggaggggaacctgtgacctccggagtcctagagggcatgtgttacagtgtgctcatttagctttgccatccacagacaacttaagtgtttaacagatcagtggagggtcagggtgacagccttttgcacccgccctcttggtacccgagtacttgtctggcatccaggaagaataaggtcatatgaatgaattgaagggtggtgaatgtggaggattttactgagcagtagaagtggctcttggcaggatggggagctggaaagcggatggagtgggaaggtggtcttctcctggagttcagccgtcccctgtggaactcttctgcgaagtcctgctgtcaagctgttcctctgaagtcaagctgcttctctttgatgtccttctgctgcctctcttctctcctctgccactctgccactctgctggtggggcttggggtttttatgggtacaggatggggaggtggggacagccaacatggttttggaaaaggcaaatttgggcaggaaaacaggaatgcatgttctcactttggactgcaggtccaggcttgagagtgtggccctcgttggggtctgccctcttctacccagtatttccccgcctcctgtctatatcacttcctcacccttccccagcttaataataactggcatcactacttattcacatgctcaagccaaaaaaagtaggaattatcttttattacttttattaattttctgggttcaatgaatcatcaaatctccttgtttttcaaaaatatatatgaaatctgtctgtttttctttcccaccacaacctcagttcaggtatccatcatctcttgcctggacttttgcagtagtccttaactatttttcatgtttccattcttaccttccacctacacagaagattcctgaatccattctcttcctagtagtcatactctttttgccttattcctctatctgggtctttaattcccagcttcatctgcatggcatactcttcttccatctttctgtaagttcctcttttctttgtacttcaggtcttgacagctgtgtatgttacctgaaacacattatagaaaatgtacatttgtacatgagatgaagataaatagggaggaagaccaaagagtagaattatctgctaagttgaacaattacaaaatagtaatctatcaaataaaatcttaaaatagctgtatgtaatttaagcttatcattaataagcatcctaattttcccctgctccttaaaattacctatacgacattgagctaaagcatttctttgttggaaagaaaaaaaattgaaaacaaaaatgcttgtgtattcagctctgcaggagggatattcaactgtatcagtattaaaaatctatctttccagaaaagaagtatgaagttaatttacctgctggtattactaatagtttaattaggtaaacagcatgagttcaaaacaattaatcatctgccataaaagtctaattattcctggcacattactgagctatttttactgtgtgagataaatatgaattttgcgggttttttttctttttcttatatttgatagctatagacaataaatttagttcttattttctgttggactctgacttttgaaatgttattttgctaacacattcaattgactatatttactgttttcctaacttgattactactttattttacttctagtgaatatattttatgttttgaagaaaatataatatttcctatacttaaatcataaaattattttaaggataaatatgtacttagtgggaattttttgtttaaagtaagccaatttgccaaattttacattgtgtaaaaaataaagaggctttgctcaggattcctcagattccagtctattctttgttagaattatttcttttctttttttttcttttttttttttttttttgagacagagtttcactcttgtcacccaggctggagtgcaatggtgtgatctcggctcactgcaaccttcacctcccaggtccaagcaattctcctgcctcagcttcctgagtagctggaattacaggcgcccaccaccacgcccagctaatttttgtctttttagtggagactgggttccaccatgttggttagaattatttctttaatgtatgtaccttagctgcaaaaaagcaaaattaaaaaaaaaagatgttttagcatacaagatttttagacagtataggacacatagaactgacagctttcatgttgaagaacaatattgtcttgatttcactggaattgttcatttgggtctatagcattctgtccaaattgcagaaattgattgttatggcatacccacgattttcatgctcatatgttataacagaatagtttttaaaaatcttgtttgaacagtttggttgtttgcatgcttccagtgtttagacttttaaaaaacgatttgaaaaaatatgatattgaagtgtactttgattttctttaatttaaataaataatagtcatatatttattaatcagatgtattaatgtaatacagtttacaaagaaattttatgtatattctcttagttgagccatacacaaaactagtgatatagtcagggaagttattaatgatctcgttcagcagaagaggaaaccaaagattatagaggtaactgattagtttaaaaagtggcatatctgtcagcattatgtgtgttcctattgcccagttttgcccatgtaattttctgtgattatggaaatgtttgatgttggcactgtctacacatgtagccatttagctacatgtggctgttgagcacttgaaatcatggctcatgtgactgaggaactaaatttttaattttatttaattttaatttacgtaaccatgtgtcactagtgactataatattggacagtgtaccctagactcaaacatatgaataaaagcaatttgaattcctggaagaaaaattagagaatacttacctttcaatgtacagcatatgttttgagcaattgaatattcttacattagaattgtgagattaaataaatttccatatctctttttatgttgaatagtaagatcattgtttttgcatattgtattaacttactgcttaatattcagcacaattataaacttttttagtttactatactttgagatatatattactattataattttaggtattctggtgagttcaaggataaaaaacatggagtgtaattgtgaaaatttgtttatgtatttgaaaatatatcagtttgccaagagtgaatcaatttcatattaataatgacaccatacttgatagtagtaatcatgaaattttgtataaaaattacattttttaaagaaatgtatgcatgtaactttttgtctcataaagtactgtgacaaaagtactacaactttactgtggatttactcagaaaaatgtatgtcaatttcacactgagattaaggtgaagcatgttgaaagtaaaacttttatcttttacattttttatttctaaatctattattaaattattaaaatcagaagtgatgagattagcttctagttccaattaagatggagtaagtaaatgcacatcactctattcctcccactgattatgcctaaaaaagattctgaacagaatacataaagtagctgtagaaagactttgaaaagtaaatatagcaggaagattggaaagggaaatcaaaacttgaaaagagacaaatacagtagtgaatttcctgcttttagcaatttcttcctacatcctccagcttagactcaaggcagtcagaattccagaactgtacagtggattcagacagaaaatgctgtggctcacgcctgtaatcccagcactttgggaggcccaggcaggcagatcacgaggtcaggagatggagaccatcctggctaacagggtgaaaccccatctctactaaaaatacaaacaattagctgggtgtggtggcgggcacctgtagtcccagctgctggggaggctgatggcatgaacctgggaggcggagcttgcagtgagccaagatcgtgccattgcactccagcctaggcaacagagcgagactccgtctcaaaaaaaaaaaaaaaaaaaaaaaaagagaaactctctttctctaatgagagaccctgtaaggaaatccctggtgacaaggaaaaaaatcaatgaaattccatttgtttgtttgttttctggtcctgctttgagacaagatatactcctaaaactgcactcctgtgtcagtggcagtagcaacaatgaccaaacaagtacctcaaattatgagaaagaatggagacaacccagaaaagagtcagtgaattagaacagaagatcaggagaaattgtctattgtaaacaacaggaaaacatttgtttaataaagggaaaagagccttaagaatctgtaaaacaatataaaaatgtctaaccctacaggtctttgaaatcacagtagaagaggaaagagattgctgcagaaatttctaaaaaaattgaatatgtaatggctgaaaacttctcaaatttcgcaactgacataaatttacagattgaagaagcttagtgaatgccaagaaaacaacatccaaagatataaccaaattactggaaaccaaagagataattcatcaacagcaatgctgctttaaaagaaatgctaaggaaagttatttaaacagaaaataagtgataccagagagaaacttggaacttcatgaaggaaaggaaagcaacaaaaataataaatatctggataaatataataaattgttttttctcctcttaagttcattaagatatgtataatggtagaaataaaaagttaacaatattgtctgttggggtttccaatgtgtataggtcggaaacaactaataatatgaaggagaagactttaaagagaaccaaatgtctgtaaggtttataagttacccatgaagtgataaaattttaattctagctgggtgcggtggctcacgcctgtaaacccagcattttgggaggctgaggcagggggatcacctgaggtcaggagtttgagaacagcctcaccaacatggagagacctccctctctactaaaaatacaaaattaggtagtcgtggtggcgcgtgcctgaaatcccagctactcaggagaatcggttgaacctgggaggcaggggttgcaatgagccgagatggcaccactgcactccagcctgggcaataagagcaaaactccatctcaaaaaaaaaaaaattaattctaagtagactttgaaaaatgaagtacatatactgaaatctctagaacaacatcaaaaaaagggaaaaaagcaactctgcaaatttgcagatgttcaagtaattcaaaagaaggcagagaatgagaaatggaagtgaaaaacagagagaagagactccattttcagcagtgacatgtaaagaacctagaatctaccactagcattcttacaagataaagctaaaaaattgagaatcagtgttttgttgttttcttccccccatcagagaactgagattgcagggcaaccactagcctgaaatctggagagaaaagcaaatccagagactcatggccgagatctgcttacttagagccaaagccactggagccataaattggtgggaacatttaaatgatagttttgacaaactgctggaggctgagtgtggactaacatgggagtgtgacacctctgggagcagcagtcttagggaggcccccacactttcatgggttttgcttctatgtattttatcaggtacttcatattctgatgaagatcctggaaaaggtcccctcgtagttcttgcagagagagggagggtaatcattatgaaatatacccagagtattctccaacaaaggtctactctgtaggggaaaatatattattagacccctatcctggtttggggagggcatttctcccacttcagctcactctagccttcctgtgtcggtttcagtgggggaaaatgtataccactggagaaaagcccatgaaggtcacagctcagagaaaataggcaaagtaaaaaataaaggtttaatcctaaaattatagactgtatttcattccccataccttactaccataccaacagagctctggtataataacaatgcatttcagctggaagagttgcaagaatggactctttttctgaggaatagtactgagataagctcaaagtcaatggatgagacaaacataaggatactagaggaacttgaagtttctgacatctatagcaaacattaaacacagcttacctcctggccagattaacaaatccacatcatatgtttacctttgttcttattactcaatgcaacatggtgaactttcaacaaaaaaaattagaaggcacacctaaaggcaagaaaaaacagtctgtagagataaagcaggaatcagaaccagactcagatgttacagatatgcgaattatcagctaaggaatataaaaaaaccatgattaatatgttaagggccataatggaaaaaatagacatcatgtaagagcacaggagatacataaagcagagagacactaagaaaagatcaaaaggaaatgctaggcataaaaaacactataacagaaatgaagaatgccattgataggcttatcaatagaatgggcactgctggggaaagaatcagtgaggcaaaaataggtcaataggaactccctaaagtgaaatataaagagaaaaaataatgagaaaacaaaaacagagcatccaagaatggtgggacattttaaaaaggtatatgatttatctatcattggaataccagaagaagaaggaagaaaaaagaagaaatatgtgaagtaataatggccaagaatgttacaaaatcaatgacagactttaaaatatagatccaggaacctcagaaaatatcaagcagaatgaatgataaagtaagtaaaccgtgcacattatatttaaaaactgcagaaaaccaaaaactaagagaaaatcttggaagaagcaagagcttggaggggaaaataaaaacttacctatagaagaacagaataagaattatggcagacttctcatcaccatgcaagcaagaaaagagtagagtaaaatattttaaaagttgaaagaaaaaaaataccaactgacctataattatatatctgtgaaattaaccttcaaaactgaaggacaaataaaataaataccttctcaaacaaatactaaggttattcattgccaacagacctgaaactcagatctacataaagaaaggaaaataatgataaaaggaaaaaaatgaaggtaaaataaggatcttttatttttcttattcctcattgatctaaaagaaactgtataaagtaacagtaggaacaacatgctgggtgataatgaaacaggaagttttccctgatgccttcgtggtggtgggggaattggagtgctggtgctggagctagttggcggctttggtcagcttcacttggctttactctgcttcacttggctttactcggcttcactcgctcagatctgctgccctctaccccttgcgggagggggagcacagctgagccagtgcaggagccaagacgagtgcttctgggcactgccaggagccaaactccatgcgggccatggcaacacctagtgagggagtacctgcaacccctcaaagccccagaagtaatgttacagtcagtactcttttagctttgccatccatggatggcttaagtgtttaacagttcagtggaccctttgcctgttcacaagttcagagagtgtgatagccttgtgtatcctgagctcttgtcctgcgtacaggaaagattaggttgcatgaatgaattgaaggacagtaagtgtgggggattttattgctgatggaagtggctctcagcgggaaagggagctggaaagaggatggagtgggaaagtagtctccccttgaagtctctctggctagactcttctccaaagtcccactgtcaagccattcctctgaagtcaagctgcttctctccaacgttcagctgctgtttctcctctccatgtttggctgcttctccttctctgccagctgggtcaggggtttttatgggtataggatttggggcagggcaggccatgggtggttttggaaaaggcaacattcaagtgagaaaacaggaatgtatgttctcactttgggccgtgcttccaggcttgaggatggggccttcgctggggaccctgcccttttctgcctagaatttttctgcctcctgttcctaccaataataccatatggataagggaaatgaatgactgcaatgttaaaagagataggagaaagtatttgggaatactctattacaaagtacctgtactgcaaagaaaacagtgtagtgttatttgaaggtggacttagattagttaaaaatgaatactgcaaactgcgggacaactaaaaaggattctaaagagagatataagtgaaatgttaagagataagattaaatagaatcataaaatgttcatttaaaaccagaagaagaagaaaaataggacggggaagaaagaataaagtcaacagttagaaacagttacaaacaaggtggaatataactatgtcagtagtcactttaaatgtgaatggtgtaaacatccattaaaagacagttcagagtggataaaaaacgaaacttagtttagaaaagcaagacttcctcccatctcttatgacatggcagttattcattttccttgtccatattgaaattatcacccagtatgttgttactattgttactttaaacagtttcctttagatcagtggggaatatgaaaaataaaagattcttattttactttcatcttttcttttatgattttttaaggcaagctatgcattgtctgtaagaaactcactttaaatataaagaataggtaaggtaaaaaggagcgagatggagaaagatataccatataatcactaaccaaaaggaagctgaagtagctgtatacatttcagagaaaacaaacttcagagcaataaacatcagggatttaaaaaggttgggggagcattacatacgtatttggcagtcaattctccaaaaagtcttatcaatcctaaatatatgaacttaacaacaaagtatcaaaatacttgaagcaaaagctgacagaagtgaaatgaaaaacagccaactccactattatagttgaagacttcaacactcttctttcaataattgatatagattaagcaggcagaaaatcagtgtaagtaggtaattgacctgagcagtactatcaatttgatgtaattagcattcattaaatgctccatttaacaagagcaaaatatacatttttttcttcagcttataggagcatttaccaagatagaccacattcttggccataaaccacatttaacaaatcttttaagatagtaatcatgcaaagtatgttcttagactacagtggaattaaactagaaatcagtaacaggaagaaagctggaaattagttaaagaacatatttctaaataacacatgggtcaaagaagcctccagagaaattttaaaatattttaagctaaatgataatcagagtacagtttatcaatttttttttgcaatttagtaaaggcagtgcttaggggaaatttatagccttaaatgcaggttctagaaaagaagaaagatctaaaatcagtaataaaaagttctaccttagaaaactagagaaagaagagcaatttaagcccaatgcaagcaaaagaaaagaaataataaaaattagagcagaaatcattgaaatggaaaacaataaattcaacaaaactaaaagttatttgaaaaaaataaataaaattgataaaattctagccaggataaggaagaataaaagaagatagaaattaccaatatcagaaatgaaagatggatcttcttcactgaagcatccatgggcattaaaaagataataaaggaatactatgaaaaactttatgccccaaaatttgataaatgaaatggaccaattcctacaaactatcaaaacttacacaagtgtaaataaatctgaatgcttctatagcttttaaaaattgaatcgattatttaaaaattataattaataattttcagaaaaagaaagaatcaggaccagatgaattcactggtgaaatatacaaaataaaaatcagttctaagataacaaacaaccctattaaaaagtaggcaaaaatctgaatagccatcttattaaagatatagatgtcaaataagtatatgaaaagatattcaatattatttgtcaaattgcaaattaaaaacaatgagataccactgtacacttactagaacggccaaaaccacacacacacacacacacacacacacactcactctgactgccgattggtgacaaagatgcagagcaacataaactctttttcgttgctggtggtaatgaaaatggcacaaccactttggaagacagtttggcaatttcttgaaaaattaaatatagttttaccacacaatccagcaatcacacttgtaggtatttaaccgatttaaaaacaatatccacacaaaaacctgcacatgaaaactgcacattatagcttccttcataattgccaaaaactgggagcaaccaaaatgtccttcagtaggtgaatggataaactgtgatatatccattgacatggctaggctttgtgtcaccacccaaatctcatcatgaattgtaatccccataatcgccatgtgtcaaagaagaaaccaggtggaggtaattgaatcatggaggtgttttcctccatgctgtactcatgatagtgagttttcacaaaatctgatctttttataaggggctcttcccctttttgcttggcacttcttcctgccaccttgtgaagaaggtgccttggttcctcttcaccttctggggtgattgtaagtttcccgaggcctacccagccatgctgacctgtgagtcaatcaaacccctttcctttataaattacccagcctcaaacagttccttatagcagcatgaaaacagactaatacatccatatgatcaaatattattgaattatataaaagagctataaagccgtaaaaagacatggataaattttaaatacatattactaagtgataaaaacactgaaaagtctgtatactttataattgcaattatatgacattctggaaaaggcaaaactcaccagtggtaaaaaatatcattaggtgccaaggttcagggaaacacaagggattaattagggttgtgaaattattggatacatggcattatgcatttgtccaaatccacagcacttacagcacaaagaacaagtcttaatgtacgcaaactttaaaaaaactcatttagaaggttgatggatctgaggatggaatgcaggaggtgaaaaaataatataactgtagtacaaatgtatgaaacaacctactgaagcaaatggagttgaaatgtgttgacttaagttaccttgaaaataagtggagtccgtaagactggaggcaaaagagtactgtagtctagttgataaagttattttccatgggaataaagttgttaacctacctaccaggttaacaattctgatatttctatatgtatatactgaaattgaacaagtaaataagttgatggtggatggtgggagccaggtttctctctatttgagtaggatttacagataagcaaggggaggcagctagaagaaatcatgtagtaatgcattagagttggaaaccagaatgaactcatgctttgcttatagacacagttacatatggaaatacttatcgataagggaataggcaaatgttagtatacacgtatatttccttgctctcagaaaagagggcctagaagcaacaacaccccagtagatgaatgtacccacttgccagatcttgatttctaagaccattctccagtaaaaggaactaaggctccttggagaaatggatgattctaaaagggctggggcaggaaatacacaaagtgagcatggggcatcttgcagtgctagaaagtaaggatgtgctcaaacacatacacaggtgtacacacatgcacacatacacagtgatggaggtatatcaaagggacataggaggaagttgatggagcttcccatggtcaaaatggaataatttgaccaacaaaataaataatgtaatgttgtataaatgctacaggcattaaaagagtaatgtgtacattagaaacaactttattacacaaagttgacaacttagttgaaatagaccatttcttgaaagatgcaaactactaatattcattcgagatgaaattgataactcagtaatactctgtttattgaagacattgtattagtatttgtaatcttcaaaaaaaatcaaaaacaaaaacgaaaaacaaaacactgtcccagatagttctgggaaattctacaaaacatttaaagaagaaatgataccaattctcacagtttcttctggaaaaatataagacagaatacttctcaacttattttgtgaagccaatcttaacctgctaccaaaatcatgcaaagatggcacatgaaaataaaactaccaagcaatgtatctttatgaacacaaacagaaaaatcctcagtaaaatattagtaagttgaatccagcaatatatacaaggaatattacaccaagaccaaaaggggttcattctgataattcaaagctggttcaatatttgaaaattaatctgtgcaacccaccatattagtagactaaaaggtaaaaaccacatgattttatcaacaaatgctgaaaacacattaggtaaaattcagcatcctcctaagataactcttcactaacccaggaaaaaaaaaggaaactttgttatctcaataaggggcatctacaaaacagtgtctacagctaacattttagtagttaatgatgaaaaactgaatgctttcttcctaagacttggaataaggcaagaatgttcattgtcaccaccttgttcaacattgcactgtaattcttgaccaatgcaataaggcaagacaaataaataaaaggcatacagattagaaataaatagttcctgttgaaagacgacatgactgcctacatagaaaattgcaagaaatctataaaaagaaagtctcctaaaactgagtttagcaacaataatatataaaaataatatatagtagcaatgcacaatgtattagtttggtacaaaagtaatagaggtttttgccattgaaagtaatggtgaaaaccacaattactgtgtacccatctaataaaacatttttaaagaactgtttacaatagctccaatttttaaaatacttaggtataaatctaacaaaattatgtgcaagatctgtgtgttgaaaactgtaaaacactgatgaaagaaattcaaaagacccaagtaaatgaagagacatgctatgattatggattgaaagactcaatatggttaagatgtcatttcttccaataagcataatccaaataaaatcccagcaagattatatttgtagacatagataaactgatcttaaaatttatatggaaaggtgaagaaactgtagtagccaaaacaacttcgaaaaaaaggaaaaagggccgggcactgtggcttacgcctgtaatcccaacactttgggaggctgaggtgggcggatcacgaggtcaggagattgagaccatcctggctaacacggtgaaactttgtctctactaaaaataattaaaaaattagttgggtgtggtggcatgcatctgtagtcccagctacttgggaggctgaggcaggagaatagcttgaacccaggaggcggaggttgcagtgagtcgaaatgacaccactgcactccagcctgggcgacagactgagactccgtctcaagaaaaaaaggaaaaaaaaatagaagatttacactatcagatttcagacttactagaaagctatggtaatcaagacagtatagtattggtgaaagaattgacacatatataggtcagtgaaagagaatagagagtccagaaatagactcacacaaatatggtcaattgatttttgacaaaggtgcaaatgcaattcaacagtaaatggatatataaattgtggtaattccatacaatagaatttagccatataaatgagtgaatattaagatacacaacatagataaatcacaattgccatactatactaaatgaaagaagccaatctgaaaatgttgcatagtctataagtccacttatatataacattctggaaaaagcaacactattaccctaaaacctttatttgaatagcaggagttatagtcatgtcatttgtcctctacatggagcacatacatcatttacacattaaatatgttttcatgtttttcttttatttaacctttaaactctaaagtacatagttctgcttggccccaagatgattgtaagaaacatggacaatgaaattttatggctataggtgaccgtcttaattaaaaccttctcatagcagattttcagacctgggacaatatatccaagaatgaatcttacccaccactattttttcaccccaacttcttcactcttatttggaaaataactgcatttaaaaataaaatgtttacttcatgtggtaatcagtgtcttgcagtacaagaaaccctgatctaggagtttgaagacctaggtgactttgggcaagtcacttaatgtttatttttttgcatcttaaaataaggataataatacctgtgctgcttactttatttgtaaggatctcaggtgcattacagtaatttcacaatggttttacagagtaaatcactttatatgtggtaaagtgcttggtaaatgtgtcatcactattattaaataaaagaaaccaatattttgtggtattttgtggcaattaaagctggttcaactctgaaaatttctataattttaaaaattaatgcagaatgaaggaggaataaaatcaacctcatgaagttgattactctctagttttaaaatcttatttaactacaagataagctattctggtaaattctcggtgcatggcgagacatttagtgcgaattaaagttgtggaaacaccgctaggaagaataacaagcaatatacttcttaaagttaattgcagttatgaaggaattcatagttttagttaaaactgcagttgtttctttctagcagtagatgccagtagagttcttctttttatttttatttcttaatcaaaaatcaaatatccgaagtacttctatagcaatagcttcctggtcacattaccacatatagaaacattgctttaaatattaaatattctattttctggaaggacttgataacaaattgaaacaattttatttttaaaacagtgcagatttaaaatacggtgttttcaagatactcatctagtgaagtttactctttttgctttagtaattttgttttaaagcttatgcattgttttaaataaagtaatcttagtgttctagttaggaatctgcaacttctgtacttgagcaacattgaatataaataaaaaatctggctagatgtgttaaaaatgaatacggtccagctgaaatgttacgattagtttgtgtatttggcaatggaataccatgagtgtaatactttggggaggttaatatgtcagagaggtgaatgattaaagggggtaattggaagcggggaaaacaagaagttaagaagtccacattggcactgagtaaaaatgtaattcaaagaatgaataaaatttagtaacaaatagaaaaaaggagaagttcaatgataacagttctattactcttgtctctatatatgagcaacttggtgcttcttggattatctataaatatggtcccatcataaataaaattcaaacattttcaagtattcggtgattctacttagacctttaaattgttaaaaatgagtgaatacttttttcttttaacatgtttattgagtatgtaatacatgcatttcatttatgaattcaagtaactcacaatttagggtcatataaattcataaacagtaccttttaacataatattatgaggtcagtgaaaacaaagcagcaaagtttgttttcctaggaagtatgtggcagacttcactgaagaggtgacatttgaactaagccttgaagatgattagaatttccttcagtagagcaaatcaagggaattcagtaattttatccacttcttcccttacagaatcagtccatgctctgtagatatttgttgaagactacagacatttaataagtgtctgttttgtgtaaggcactaccagatgttaagaaacaaattattgttatgcacacataatatttatacataaagctacaaatttaagaattttgtcatatagatgctgttgcatatttgtttagattgataaaaattttattacacaaaacaaagtatacagaaatgagctgttacatggcaaaattcattggtcagtgttttgttaactgttattcacacataatatttatacataaagctataaatttaagtttatcttatagatactgttacatacttgtttagattgatatgaattccattacacaaagtatacacaaatgaactgttaaatggcaaaattcactaatcagtgttttcttattggccttttatgtagtcctaatttgattacattattgttcctatttattttacttatcagtattgtttctattttttatgtttgtcaaacagttggcagtaaatctgaagtaagatttttttagatagattgttttagatagacctttttctttctttcctttccttcccttccctcccctcccctctgcttccaaagagaaccacggaaatttcttatcctttagtgtcaaaaaaacaagtactcaaaatttttgttaaatgccacaggttactttctttcctgaaaattgacaaggcaagttttacttacttttaatcaaaagagatgttttggccaggcgcggtggctcacacttgtaatcccagcactttgggaggccaaggcgggcgtatcgcttgaggccaggagtttgagacaactcctgacctggccaacatggagaaaccccatctctactgaaaatacaaaaattagccgggcatggtggtgcgcgcctataatcccagctactcggatgtctgaggggcgagaatcgcttgaacctaggagcggaggtcgcagtgagcagaggtcgcaccactgcactccaatctgggagacagagtgaaacaacgtttaaaaaaaaatagagaggtgtttctaagtgagatcactaaatcaggggtttaggtaagtagtagtcttcagtggtaaggttttaaaattaacatgtctcagccaactagaaggaacttttttctctcaattgaaatttcttgctatggtggattttatataatttaaatcttgtattttgttcttttcaaattttagaatgttttaaaatgtacccctggtaatagacatatgtcagcagattataagtttgataagcaatactgacatactaagtgtatgtagttcctgtatgtattaggcctaaatcaatgaattagaaacattcaattttttaaagtgctatttcacattgttttatttatacgtgttataaatttgttttgcaagagttttttcatacccatttcatactagtttttttttatgaaaagttagctgcttataaggattcataaaatctgtatattagttgatttcctagaaaaaatacaacctgtctttagcatgttgtgtttggaggacagcttggccttcagttgtttgcatagacttgtcatacatgtttaactagttttctttttaaagaatgtttagcctactatatatataaagctttatatttaatgctctcattagcctatatattaatattaaaacacccaaacataaagccttttaggcagatattgcaagtttttaaaatcctcaactctagctgaaaagtgttttgctaagaaaagctcagtaatgtgctgttttatattaacaggaaacagaacagcagtagtggtttgaataccctgcaaacaggaagtttgacacatgcatagctcttagcttctgtgtaagaagttgtgagctccttctggaaacatttgcagttacattaagtaaagtgtaaatgcacatgaatggcagcttatagagaaccaccttgtaaccagtatacaggtacaactacagctcttcagaaattggaaggttttgctagccggttatttcatagacactctaaaggtactgcacatgatcagaaaacagctctggaaaatgacagccttcatttctctgaacatactgccttatgggacagatcaagtaagttttgttttttaaatgatacattataactagcaactaaaatggtaattggagttttacaatcaaacataaagaaccctcttttgtttgttgttttctgattttcacaaggacattttgcaagatgaagttgaaagaattccataaaaacttgattataagttgagctgaatcattcagctttcatcattgtatggttttatttttgactaagttcaatatcagtgacaagattttctataaaattcttacatcatttctaatgtacttttttttgttgttcttacataaaaatgaaatacttaagtttcagaaacaaccatctgtttacttcttaaaatgtcttgtatttataagctttaaactttgaaaggggcaacaagactcttgaatttataattacatttctattgtgtttgccatggttttatttttaaatgcatgtgagaaagttatttcagttttacaaacaggaatttctaaaataaaacataattattctatctaaattcttacacttataacattatggatatcaaaaactttataattatattttatgttatttatacatatgactcaaatgcaggaaaagttggttatgcatgaatcacattctttcaggcatgttaaaatgtttgaacttgcagctttgctaaaatggtgctggggaaccatttttggtgccatacactctaaaagataaattgcacatataaacaatactagtgccgccattctacatctcaccttggaccctcctcaaggtatttctgtgactccaattagaggaacaatagaattacccttgaaacttttgccctctttggtgtgtttgtttgatcatcaaatagcactagcgtttgactctttctgtttatgtatttggtagcagttaaggaagaaaactcagcttaacaaccacaacagcaaaatcaagaatggcttacaaaatttactcctaggtttatacagcaccttgacagtgttatagaagcttatttgaattaattttttactaaatcagaaatttttttacattcttcaaactatttttgggagattgaggaagaacatgtatttgtgcattttttccacttaaaaggttttgggttatttatagtctttactgtatagcaagttgatggatgaggaatatgaatatatatcttcaagttaatgaactgttgaatattaaaatagtggtataatattaaactttaccatgtaacaaaagcttgttaattattgtccttgccctattcttttaaattgcagtcttttaaatccttttggaaattatttttatgcatttcaagtatgttttaatttaaagttaaatgaggaattaagacagaattgaattaatttctgtttcattaatacctgctcttcatatagtgggtgtttagtaaaagtgtctcaaataaatgaatgttaggggtttttaataattaaaagttatgtttgaactagactttcaccactttttaaatgtatgggatctgtgatgctttctaaaacatattttaaaatctagtaatggaaaatagtatcatgagccatgatttctattggataaaatgctgttttgttttttttttattgtgaagtcaaaacaaataggattcttgtacacaaataaaattaggagcaaaccatgtagcgctgcaaataatatgcatgatgtaagaaatacttaaagagtaactgaatgttcattaattaagcattcctctacttgactctcctttttatatccctgaataccataatagagataataattttatgtctaaggatgagtatggtagcatgaagctataatttcctattatgaaatgtattattgtagaggagaaaacactgatagagctgaaatagaggaatccgatcatttcaaaattccaaggtttatttttgtggtgaaaacacaatttttatttatttggcgaatgagttatagaaggagttctgactgtacaaagtttcatatgaaccacattcttcaaagctacttaaagcagtttacttgcatgactcatttgacaagggaatgtaatgtctcctgatgataaacactgaatatgtttgttcctaaagtgtttttataatgaaataaactaagcatagaaactacatcaatttacaaaaaaaattcataaacctttgtataaagatcagttaccaatttaggagacatgaaatgcagcatgcttcaatccaagtttctttcgtgtccagtgacattatgtataggaagaaacacagaacaaaggccacatagtggtctcaggtgtttcatcttttactattaaactaagtaacagaaattcctgtttgattaaataaatatgtaacagctaattgcatgcacatataaatacatgaagttcaaagaaaagcatggaggaattctgctttttgttccaactcagaatgaatgagagcattgacatgcgttaagttctctttctagcaaatttattatagttagctttttaatcttcctttgatcataaatgtgtagagttatacaatgctgacttaatgaaggtctaactacagtattttaagaagcaaataggtcaataccatcaaatactttttctttcccttttcctatgaattgacaggctatttctcttgtaaatacaaatccattttagtaaatcttagatttaaatatattaaacaaatgagcagttttgattatggatgtcctctagcaaaatcataaagtggttacagtagaccacttcagtcagttttacctttgcaaattttatacaatctctcagacagtttacctcctatttgttagcccattgaatctgtatcattttaacttctcagctaaaagactttccacctttgtctttttatcagctttttccacttgaaactattccataagcttcttgataatagtcaatttctactcatttggtaaaacttttttgagtatttactatatcatagtaagtaagcaagtttccaggaaaaataagatctagttcttacccccaaaaagaagagcaaacataatataatattcaaggcataatgaaatagttgctttaaaatgtctaagcttactgtggaagctaagtgtaagaaaaaagttgttactaaagagaaaatgggggacttcaaaaatattaaagaatgaatagaattttgagacctagagaagaaggttattttaagaaaataacatacacaagtatttgaaaatatgaacatttagaacttacttaaaaggtttagtaagatactgtctagaaaattaggttctggatttaaactttaaaagttttctattagacatccagaattttgtactacgctgtattagtggggagccaatgcagttttttaaagtggaaaataatataatgcaacctttgttaaaagagcctaaagattttaactagcataatacaggataagttaacttactttactacagagaaatgtgtatagctactatacatcttccgtttttgctgggcatttaattagaactaacgcttttgacgtgacagtcagcatggcaatgaatagtcagataatggattccttttacaacagtgcttgttcaagttgctgcttctgtctggaattctctttcttcacttctaccagtggtgagatttgcccatactttaggcatcctctcaggtatcatctctgtaacaaaaccaccaatgtatcctattcatctatccttcatccttcttagagtctgtgctcttccttatgttcttatatcatcttatacttaacttttattgtggtttatttatagtatttatatggtatagtttgtatactatatatattatagtttataatatttaaaatgcattactattaatccttatgtatctgtctctcatgtttgattttgaactccttgaaggcaaataacttgtcagtttatttcagtattactagcataattttcaataaatcttgagttatttgttaaattaacattaaacatcactgcagtattacacaaatgagcttcttactaatttgtgctattgtgatctttgcaatttattttaaaagcccatggccattaaccaaaagcagtcaaatgctgacctggctctagtaaataccaattttcagtgttacctgtgtatttttatcatgatttccaataaaaatttaagtaacaagcagactttatagtaaaactaaaatagttgggatattaaatgatgttgaaatcaggaaatcattccatgagccatttagcaatgcaagtactatatcaactgtactaacataacgagaagcttttacttgcttgtgctttgcaaaaatagccatatgacagagttagaagacagcttgctactcaaagtgtggtccctgtccagcattattagcatctcctgggagcttgttaggaggaagaatcccaggtcccacctagacctacttagtcagaatcagcattttaacaagatttcccagctgatttatatgcacattaaggtgtgagaagcactttttccctaataacattttaatatgatttccaaatgtatatcttcactggagaaaattttgaaactacaggaaaaaacaaaaaggtaaaaaaaagtatacataattctgccaaaaggtaatgactgttaatttttgtatatatactctattttgtgtatagacacacaaatttctaccagctccaattttttttttttaaacagagtcttaccgtgtcacccaggctggagtgcagtggtgggatttcgactcgctgcagcctctgcctcccaggctcaagcgatcctcccatctcagtttcccaagtagctgggactataggcatgtgccaccatacccggctaattttttgtatttttggtagaggtggagtttcaccatgttgcccaggtcgatcttgaactcctgaactcaagtgatctgcctgccttggcctcccaaagtgctgggaatacaggcctgagccactgcacccagcccagctccagaatttggatctttcaaaacataatgtttagttaacatttttctttataaagagttgttctacaatactattttgtattaaatcataaggatatactataatttatttaaccaatcattggccatctaggctgtttttaatgttttgctattaaaaaatgccatgataaacatctttataactaaatatttgtacatatttaggattatttttatattttataggattaatttgaagaagttatgaccattttaaggcttttgcattaaattaattgaatcccagataaacatgcatatctttttggagttaattattataataattattttttcatagattatagcacttgagaatgtgtgaaaataattatatagctactatccttaatgatatttttaaaaacaaatttaaggccaggtgtggtggctcacgcctgtaatcccagcactttgggaggctgaggtgggcagatcccttgcagtcaggagttcaacaacagcctggccaacatggtgaaaccctgtctctactaaaaatgcaaaaattagccaggctccatctacaggtgtggtggcgcacacctgtaatcccagctacttgggaggctgaggcaggagaatcactagaccccaggaagcagaggctgcagtgaggtgagattgcaccactgcagtccagcctgggtgacagagtgagactctatctcaaaataaattaaaataaaataaaataaagaaaacacatttaacattgtaaaatttattctcaaaacagtatattgatatttttaaaaattaaaaatataatggcccattatacttccttctgttacaactaccagggtcatggtaagaacattatatgtttgtcccctccaaatctcatgttggaatgtgatccccagtgttggaggtggggcctaatgggaggcgtttgggtcatgggggaggatctctcatgaatggcttggtgtcctcccaatgggtaatgagctggttcttgctttattagttcatgcaataactggttgtttttttaaaacaaacatggcacttccccctctctcttgctccctctctttgcctgtgacatgcctgctccctctttgccttctgccatcattgaaagcttcctgaggccctcatcagaagcagatgttggcagtatgcttcttctacagtctgcagaaccatgagccaaaataaatctctttataaattattctgccttaggtatttctttatagtaatgccaaaatagaccagtccataacaaaaatctgaatgtgaaaaatatggatttgagaatttaactccattcttaataagttgacactggaaagtttatttcttcctccctccccctcagctttattaaggtatacttgacaaataaaattgcgtatatttataatgtacaacatgatggttcaatataagtatacattgtgaaatgactaaaacaaatgaatatccacctcacatagttactttttcatggcaaaaaatttaagattgaatctcttagcaattttcatgtagtcatacctcagagatactgcaggtccagttccagaccaccacaatacaactaaagtcacagtaaagcaagtcacacattttttggtttcccagtgcatttaagttatgtttactctatagtctattcagtgtgcaataacattatatctttttaaaagtacatatcttaatttgaaattattttattgctaaaaaaatactaatgatcatctcagctttcagcatttcccaatttttttgctggtggagggtcttgcattgatgtttgcctgctgattgatcaaggtgatggtcgctgaaggttgggatggcagtggcaatttcttaaaataagacaacaaagtgacacacttgactgactcttattttcataaaagatttctctgtagcatgtgatgtttttggtagcattttacccacagtagaacttcttttaaaattggagtcagttctctcaaaccttgttactgctttaccaactaagttgatgtaatattctaaattctcaggtgtcatttcaataatcttcacagcatcttcaccagaaatagattccatctcaagaaactactttctttgctcatctgcaagaagcaactcctcactcgttatagttttatcaggagattgcagcaatagagtcacatctccaggctccacttttaattctaattatcttgtaattttttaccacatctgcagtgactttctccactgaaattttaaaccgctcaaacgcatctatgagagttggaaacaacttcttccaaactcctgttgatgttgatattctgacctcctcccataaatcacaatgttcttacggcatctggaatggtaactccttttcagaaggttttcaatttactttgcccagatccatcagaggaatcactatctgtgacacctttagccttataaaatatatttcttaaataataagacctgatccatgcctgcagaatggatgttgtgttatcaggcatgaaaacaacgttcatctccttgtacatcgagctcttgggtgatcaggtgcattgtcaattagcactaatattttaaaaggaatctttttctgagtggttcccaatggtgggcttaaaatagtaaacaatgctgcaaacagatatggtgtcatctagcctttcacattccatttatagagtacaggtagagtagatttagcatagtttttgagggcactaagagtttctaaatggtaaatgaatattggcttcaatttgaagtcaccagatgtattagcccctagcgagagtcagcctgtcctttgaagctttgaagccaggcattgccttctctctagctaggaaagttctagatggcatcttcttccaatagagcactgttaattctgcattgaaaatctgttgtttagtctagccaccttcatcaattattttagctagatcttctggataacctggtgcagcttctccattagcacttgctgcttcaccttgtacttttatgttatagaaagggcttctttcctttaaacctcatgaaccaacctctgctagcttcagacttctgcaacttcctcaccactcttagcctttatagaattgaagagtgtcaaggccttgttcttaattaggctttggcttaaggaaatgctatgactggtttgatctttccagaccacacaactttctctatatcaacaataaggctgttttgccttcttatcattagtgtgttcactggagcagcacttttagtttccttcagtaacttttttcttttgcattctcagcttggctgtatggtgcaagaggcctagcttttggcctgtctcagctttcaacataccatccttactaagcttaatcatttctagcttttgatttgaagtgagagatgtgcaattcttcctttcgtctgaacactaagaggccattgtaaggctattgatcggcgtaatttcagtattgctgtgtcttagggaataggaaggcccaaggagagggagagaaatgggggactagctggtgagtggagcagtcagagcacacacaacccttatcaattaagctcaccattttatttgggtgcagtttgtggtgccctaaaacagttaaaatagtaacatctgaacacagatcgccataacagatataataataatgaaaaaggaaatattgtgaaaattattaaaatgtgacacagagacatgaagtgagcacatgctgtaagaaaaatggcaccaacagatttgcttgacacaaggttgccccaaccctcaatttgtgaaaagtgcaatatctgctgagtgcaataaagcaacacacaataaaatgaggggtgtgcctgtattaatgcattattattaactgcagttaccattctatacgatgaatctccaggacttattcatcctgtctaagtgaaattttgtaccctttagccaacatctcctaaatcttccttccctgaaccctcccatccttcagcccctgacaaccagcattctattctctacttctgcgattttgatgtttttaggttccacatgtgtgacattatgcaatatttgtgtttctgtgtctgccttatttcacttaatataatgtcttccaggttcattcactctatcacaaatgaaagaatttccttctttcttaaggttgatagtgtattccagtgtgtagaataccatacgtcgatgccatatcttgtgaataatgctgtaatgaacatgggagtacagatatctagatatctcttagacatactgatttctttcttttgatacatacttagaagctggatcatatgatagttcatttttaattttttgaggatccttcatatcattttccataatggctgtactaatgtatattctcaccaacagtgtgcaagggttctgttttctccaggtcttaaccagtgcttgttatcttttgtcttttttataatagccattctaacagatgtgaggtagtagctcattgtgattttaattttcattaccctcatgagtagtgatgttgagcatttttcatatacccattgaccatttttatgtctgcttttgagaaatgcctattcaagtcacctgcccattttttaaattgggtatttgttttcttgctattgagttgtttgagttccttatatattttcaatatgaactccttattagatatgtggtttgcaagtattttctctcattctgtaggttgtctcttcactctgtcgactgttttctttttgcacaaaagcttttagtttgatgcaatgaacaaaccaataaggaatatgaagactcttaatcagtaatcaaaaaaaccccaaacaaaataaaacctagtagtatttcatggcttcactggtgaatttctatcatttaacaaagaattaatgccagtccttctcaaactctcccaaaataactgaagaaggggaaatacttccaagctcatttaccagggcagcattgctctgataccaaagccagacaaggatactgcaaaagaaaattataggccaatatccctgatgaacatagatgcaaaaattctcaacaaaatactagcaaattaaattcaacagcacattaaaggatgatacaccacaatcgaggatggttcaacatacacaaatcaacatatgtgatacactattaacagaatgaagggtaaaagttatatataatcatctcagtagatgcagagaaagcatttgagaaactttaacattcttttatgatggaaactttttagttatggaagtgctgtacttcaacataataaaggctacataggataagccctcagctaacatcttaatagcggtgaaaagatgaaagcttttcctgtaagatcatgaacaagggaaaggatgcccactgttaaaacttctactcaatatgatactggaagtcctatccagagcatttaggcaataaataaataaataaatagcatctaaattggaaaggaagaagtaaaatcttttacatgtgcaaatgatattatcttgtatattaaagaccctgaagactctaccaaaaaaactgttaaaactaacaaattcaataaagatgcagcataaaaaattaaaatgcataaatcaatagtgtttctgcatactaacaatgaactatggaaaaaagaaatcaagaaagcacttctttttacaatatcacaaaaaatgcataggaataactttaaccaaagcagtgaaagatttgtacactggaaactgtaaggcatttatgaaaaagtgaagaaaacacagtgaatggagatatctaatgtttatggatctgaagaataaatgttgttaaaatgcttctagtatccaaagcgatctacagattaaatgccatctcttccaaagtttcaatgacaggtttcgcaaaaataggaaaaacaatcctaaaacttgtatagaaacacaaaagaccctaatatcctaagcaatcttgaacgaaaactttttccactgttaaaaattggtcagtgagtaatagcagatgatctgagagacaaagaactttgaaaataagatgtcattcagaaagaagtaataagttgaacaggaagaatgatatgtgtctgagagattgaatattactttcatgtcctgaaaccatggttgctttcagctttggtgtttcattattgttatttaacaagtatggctcacttgagagacaaataagttgtcatcttttaaatattcagtttaatcaccggcacacttatctattcaaattagcaagaattccaaggaggtcttttcttagagtcttcgttcagctgcttcaagtattgctatactcctaggagtttactcattccaaggagactaatttgctctccaaaagttagttgaagaaagagatggagatttttattttttggagacagggtcttgctatgttgcccaggctggagagtagtggtgtgatcatggctcactgcagccttgttctcctgggctcaagctattttcccacctcagcctcccaagtagctgggaatatagatgcatgccactgtgccaggctaattttttttaagtttattttttgtagagatgagatcttgctgtgttgcccgggctgttcttgaactcctggggtcaagcaatctcctgtattggcctcctaaagtgctgggatcacaagcatgaacatataagctagtgatatcacttttagccactgttgattttaccactgctacattgtttcgtgatttaaaagtggccccaacaaattttatgtaccttgtcttgttgatgtgatgccactgatccttgcggagacctcagtggttcttaatgacaggatgattcactcttcagtattatgttcattcaaaggttatgtcaaaggatttcatttccttaatttatactcatatgcttagtcatcttggcttccttgccaagttggatgtgtgagaaggtactttcagcccatccccacactgtaccaaaattagcctttctttcttgaaatctagtccagggatagaaaaccagtggtctgtgagccagatgcaacttgcagatatgttttgtttagttctcatggtatttttaaaaatagttgaattttatatcattatataaaaatataaaataccgtgattttaaatcaagagattcatataaatatctggactttcatattcttgaaccattggagaaactgatttcagtgacctcttattctctcaggagaaaaaatgggttgcactgaataattgtcctctttaatcagatatacactatctgatttgctccagcattcactatttctgttgctttacctgcctggcctctgtagtcacttggatttagcctacaatgtctctacttttcagcctgaatcaccaacccagattatcatttcccctttgataaagcctccttaagcatatattcctacttgtaagccacagacctatcactaaaatctatgaaagagatttttgtaattctgaaccttgaggaggatggagtctaggagttgatccctttcagaattcctgtttcatttttttatgcagatctatttaccttctttactttaattatctctgtttaccacagagtattgagaaggcatggcccttatgaagcctcaaaagattttgttagatcattcccctgaggtaatggatgcctaccagccttacatttgcataattaaattgtccactgaaatgattcttcccacagcaaagatctatttcaagccaactgtttcctcctcggtagagaagcatttgacaactttttttttaattgaggtatgttttcataaccatataaatcactcattataagtgtataattcagtattaattagtaaatttaaggatttgcgcaaccatcagcacaaatcagttttagaacatttaatcacccacaaagttcatttgttacccatatccagtcaatccccactctcacctcaatctcagataaacactgatctgctttctgtctctatagattttcatttctggatgttttatataaattgaattatataatatgttatcttttacttttggcttctttcactagaataatattttttaggttcatccatgttatagaatatattaataattggttccgatttattgttgaattatactatgttgtatggatataatacattttgtttatccattctgcagttgatgcacatgagaattggtttgtttttggccatttggataatgttgctataaatatttgaaaagaagtctgtgtggacatatgtttttatttctcttgggtagatatctagaagtagaatttctaggtcatatggtaaatttatgttttaaagaaattgccaaattgtttcccaaagtggtggtaccattttatgttttcaccagtaaggtaagagggttccagttttttcacatgctcatcaatgcttggtatcatcagtctttctttcttttttttttttcccctcctgaaacaaagtctcactctgtcacccaggctggagtgcagtggcgcaagtgattctcctgtctcagtcttgagtagctggcattacaggcatgcgccatcactcccggctaatctttgtgtttttagtagacatggggttttactatgttggccaggctgggcttgagctcctgacctcaagtgatccgcccgcctcagcctcccaagtgctgagattacaggcatgagccactgcacccgtcttatcagtcattttgattatggccattatgtgagtgtgaatccgttgttcacagttgtttcactttgtattttcctaataactttatgatgttgagcatattttcaagtttttataacccatttgtgtatgtactttggagaaatgtattttcaaatcttttgcccactttcaaaattgagtcgtttttcttcttattatcaattctcaataattctttgtatattctgaactaagttcttttccaaaaatataaatatcaaatatttccttctagtctgtcttatgttgtcatttttaaaaatgatgtatttgaagagcaaaatttgtaattttagtgaagtccaatttatcgttttttcctttttggattgtacttttggtaccagatcttaagaaatttgtatctaacgcaaggtaatgaagattttcaatctgtacttccttctaaaagtctattttttgagttaatttttatatatgttgtgaagtatgaattgaagttcttttttcaacatgtagatccattttttactgcactacttgttaaaaagaatttcctttctctatttaattatcttggcatctttctcaaaaatcagttgaccataaatgaaagggttcacttctgaattctcaattctgtcccagtgaactacatgtctgtcctcattcctatactacactgtcttgattactaaaactttaaggtaagttttgaaatcacatagtgtaagtcctccaactttgttcttcttttatcaaaattgttttgtctattttggggtcctttgcattttcatataaatttctggatcaatttgtcagtttctaaagaaaagctttattagattttcatagagattatatattgagttcatagattaacttgtagagaattgttattttaacaattttgagtcttggaatccatgaacatgaaatgtctctccatttatttacatattctttaatttctttagcgttccagtcttgtaaaaatgatttctaagtgttttatttctgttgatattattgtgaatggataagtcttaatttcacatttggattgtttgttgctagtatatacaaatgttattgatttttatattgatcttatatcatcctatgatgttgctaaactcattttttagttctagtagtttctttatagattccttataattttctacatatagaataatttcatctgcaaataaagacagttttatttcttctttatcctttaatatctattttcttgcctcattgcactggctagatttcccagtacaaagatgcatagaagtggtgaatgccttatgccctatcttaaggggaaagcgttccatctttcatcattaaatatgacataagtatagagtttcccctgccccacatgtcctttatcagtttgaggaagttcctttctagtcctcgttgttgagaggttttctcatggctgttggattttgtggagtgcttcttctgcatatattgagatgattatttggttttatactttattaatataacatagttcgttaattgattttcaatgttgaaccaaccttacctttcatggaataaatcccacatggtcattgtgtatgatcctctgtatatactgctagattaagtttgctggcattttgataaaaggtttttgcatcaatgtttgcaatggatattggtctgtggttttcgtttgatctttgcctaactttggtattaggcctcttagaatgagttgggaagtgttcctgccacttctgaattctgaaagagtttgtgtagggttggtattatctttgaatgtttcatataattaaccagtgaagccatctcgacttgagcttttctttgtgggaaaaattttaattactaattcaatatttgtgttacaggtttatttacattttctatttcttttttagttagtgttggtaatttgtgcctaagagtttttccatttcatctgttgtcttatatgattgggataaggttgtttatagtattcctttataatccttttaatttatctagcatcagtggtgatatcatagtttcattactgatttctgtaattaatatcttctgttttctttttgttcattttgttttgatatttggtcagtctagtgaaagttttatcataagacttttggtttaattcatttttctctactgcttttctatatattttactgaatatattatatataatataatactataatatataataatatatacaaagcttaagttactgatttggaacttttctattttactctaaatggttaaagctatgaattttttttctaaacctgctttatctacctccaataaatgtagatatgctgtagtttattttcatttacctcaaaatattttctaatttcccttggaatttgtttgtgatttaatatctaaatatttagagatttctaaaatttctttctgtttttatttataacttaattctgctgtgattatagaatatattttgaaagctttggcaaacccttcaaattaattgagacattatattttctagcatttgcttaatatgtagaatatccatgtgtgcttgataagaatgtgtattctgctgatgttaaattctgtattttataaatgtcaagatttttttgatggtgttatttaagttgtttgtctcttttccaatttcctgtctagtttttccatcaattattgagagagaagtatggaaatttccaactattagtattaaatatttttctcctttcaattctgtccgtttttattttagtactgtgggggctcttctgttcaatgcatatgcatttctaattgtcacatttttcagatgtattggccttttataattatgaatgtcccttttgtctcataatttttctagacttaaagtctattttgtctaatattgatataggcattccagctgtcttatggttactgtttgcatgatgaatcttgttttcctgtttttactttagcctatttatatctatgaatctaaaatgtgtctcttatagatgttatatagtttgatcttgatttttatccaatctgataatttctgccttttgatttgtgtttcttccattcatagttaatgtcactattgatatggttggatttgtagcttccattttactgttttctgtctcatagtttttgttgttcctcttttccctttctaccaccttcttttctattacgtatgttttaattatttggttttgatttttaaaaataaaatttaaaaggcattttcttaatatttctttagagattataatacacaagattataatttatcttatcatagtttacttcaggatagtactgacttaattctagtggaatagaactgctttgatccaatatagcttcatttcttttccaaatttgtgttttttcacatatatttatatattttataaacccagcaacataatgttgtaattattgcctcatacaactttaagtctcttaaagaaattaagagagaacagaaaaaatgtgtatttatatagccttttatttatatatttaccatttttagtgctcttcatttctttctgtcaatttgagctgttgtctagtattatttcctctcagctttaaggacttaggtatttctgcttacaacaaatatcctccgttgtttctctgggaatctttcatttcacctttatttttggaggataattttcctggatagagaaatgttggtggatgggtttgctttcttgtttcttttagcacttcatttctctgccttctggccctacttatttctaatgagaagtcattaatcatatttttcccctggacgtgattcatcatttttctcttgctgctttcatgacttttctccttacctttcaacaatttgactatgatatgtctcagtgtggatcttttgggttttattctagttggcattggctgagcttcttggatccataggttactgttttccatcaaattgggacattttcagccattattccttcaaatgttttttcatcaccctttgtctctctcctttttttctaattcccatgagatatatgttggttcccttgatatcccataagtttctcaggctctgtccacttttctcctgtctttttctgtgttcttccgactggatgatttccattgatctatcttccagttcactgatttgatcttttgctcttttaaatctgctgttgggcttactatactgagttttaaaattttggttattatacttttcaaatctgcactttttatttttaaatagtttttctttctatattgaaagtttctatatgttgttcattactgtcgtgttttcctttaggtatttaacacaattttcttttaattattttcatatatgtataatagctattttaaagtctttaaagcctttgtctgctaaattctacacctgggcccattcagggacattttttattgactgctttttttcctcattgtggatcacacaagtttttgtcaaaaatgtgttttttaaaataacatgtggtagtagctctgggttttgattattttttccctgagggttggttttgtttatttttttattaaaaacttcctttgtcttaatctatggaatctgtatccctcatgatatgtgactactgatttctctgcttagttttttcttcttattctaatttttattttttaacctggtttcctagggattgccctgtgtctctgtagcttaattgttatttaatgattgatcagaggttgtactcaaacactgggaccagccagtgctgatggaactgtgtgcaaattgaggagcacatgcagtatttaggcagttcggaagtctgtaccagctttaactttccactgggccctctttcgtgtcctttgtgcttgtcattacctcctagtcagattgcatagcaaggtgggcagactgggtggcctggtgaacttacgtagcctctgtctgtctcatcttcatttaccccatgctatgtttcttgctataccaccaatgtgttgcttagccctaccaaggccatagccttagactgttaatttctttcagcttgcttttttcgttgacaatatcactaatgagttttttggcctccacttcaaatcaaatcagccccctctcatgtcagccccttccagaagtgaagctgctagttttcatgaccagccctaccctggtagaagtactctcctgactgagctataaaggagtgggagcagccccaggcaagaacatctctgactcccactgtttttaggcagagttcagtggttcgtcacaaataaatgtttcttaatttgttgtttatgactgctcgatttccagagccatgaaatcattgtttttgataattctgttcagcttcatagttgtttcttaggaagatttcctgacttacttccacatcaccaaaagtcctgcctcacatggcaactgttaaaatggcaagttcacgtgctgaagttctacttaacaaggaaccattctatagattctttgtaccattttggtacaaattttggatctctggtaatcaaaacaatctgttcaccatgctacccagtcagcccaccttgctatacaatctgtcatcttagtcctgtttcatgtgaggaattttacatttctgcaataattgccagtaacttttttgtgtattattttcttttgaataccacatggatggcatctgacactgtttgtaatgctgaatttaatggaagtttacaaataagttattctatgattctcctttaaaaatgcagatatacatatatgtatataatattattctcttccataacacagaatgtttaaatggttaacatttgtgctgcagtatagctttctggctcatgaaaaatgaaagctatcagcgatctcggcaataagattcatcgccaatagtcactagcaacagcacacagcattttaatatcagtgaggtccacagctagcagtaagagctggtgtaattgaaagacgtttaggtgcaatcattctgctgtttgctccttgccaggttcaacatgggattgtgtgagtatttgaagaaaacagcaattttttcatatctttgaaagatgtaaaaagcgtagattagtgcttaaatttaagaaatctggtaatttataatcatgtggctctaaaataaaaaggtattttatttgtctggtggattaaagctttagaaaagctacgccttggatacaagtgaaccgataattctggtctaatgttgccgtggtaacaactcatgctgatataattgagaacatcttatacatcctggttcgaacattttctccctgccattttgagttgttctagtggtatatgaaggaggctgggataactagcttgaaagaaattcagtctagttatagacatctttggcattaatctgatgtttactagtgatatctcatgctaggcagttatgctttgcttctaggggcttctctttttaaaacaaaagaaagctcttttcgttttctgtgtgctgcatgctccagtgtgtgtgtttacaccatcggttcttctccctctagagattagcataactccctttgctgttggattgttattttgagcaatatgttttggaaaggttggttttcatcatgagtggtaagtatgctctctgagactctgcagctgtttatttaaaaaatatatttataagaggaaaaaatatttttaaagggacagttataaagccacagctactgtgaattatattttgtggtgacgcttttgtacttaggcattatagtaaattgccttcaaaaaccagtaagaactgtaaacaattaatggcactattaataatcaataccaataatcagtttctaattttctttatggttcgatttattgtatttgttgggcactgttattaattgtgttataaattagtaagtagactaaccataagagaggattttcttttagtatctgatcctgaagataattagtttaactttcctttgattagctttgtcattcctaatgctaatttttattagattatttttattagattttttaaatagtaattttgaaaataagatgctgccagaattttgttgatgtcttggttgcttttacctacaatttattgagaaataaggatttaatgatgaaataattagagcattttggttttgtagggtttgttaaaatttttaataaacagtttttgggggaaataattttttagaataagtacacttgtgacaactagtcttttttgttataatgtgatttattttttctaaatatttccaaaactgtttttttgaaaaaatatactacagtatgtactgcagtttatcatagggtaaaagctgtcacttcaagccaaacctgcagctaaaaatagatatcctgttgttagagtgaaaaacatttgcttagagcataattcattagcatcttttgcttaaataagatgcttggaagttaacctttgattcagatatttttaagagaagtagaatatggtttctctgataacataacagtcctataatttgcatttataagatttggaattggaatttagaaactgaaaggtggatttttgctgtataatgatagaattcaaaattgacgaaccttttctttcataactggagatcacctcattataaccaataaatattctttatcctgctacagtacaatataaacctcttaaacactgttatatatttgtttatagaataatattagatattaaagggacattttaacatgcaaaatactaagaattaactggattgttattttcctgttactgaaatagatctgttttaaataatctgctgttttaaatttgaacgaatattacaaaaacaacttaacattccttaggatttctatggatatcaaactgaatatacctggttgtcatacatatatttatttgaatcaggccaatgcatattttctctttgaaaatttggcatataatctagaatctttaggtaaccaccatggtgttctggaggttttacaacaggatggattggatttagctgaaggaaaatgttattgcttcactattgctttatttttctttaaaaagctatgcattgtagatagcatttgatatatttgatcatattggctttcccttctagccattttataccacaaataatcatagtaatcacaactaggtgttctgactttgtcgagaatgcccaatttcaactgattttaatcatgtcataaatggttaagtgtcctagccatttcaacttggaaaattacaagagaagtgtggttttatttgtaaaaataagcaaatgctaggccttttaatctaagtctgtaactacacatgtgatatttatgtgtacatggtacttttctcgttataagactattccttttatcctttgccaattaaatgttggttttctctgagaatctatcttttggccttcttttgatgctacattttctccaaaaaatctcatccatgcctacatcttcagtcattacctgaacgttcagttcaaaagtggattttcttttatcatccctaaatctgctccattttcattgactctgatatctgttaatgatctcactgcccatacaggaagtgaaaacagaaaccttggtcatttctaacttgtttcttaccctcagacatgtactcagtcattaagttctattgattctacatcaaaaatcactcaatattctccagtcttactgacactgggatggcttctagatctcttctcaatcctattataataactgcattactggtctcccagcttccagttttatatccttccaggccattttccacactgaaaattttaaaatgcaaatatgcccattttttaaactaacatgaaaactttcagttactccctattgcctttaaaataaaagttaaactccttattaggtcacatgcaatcaatgacttacctttttggttttgtttgcaaaatctctctcacaaattttgatctagccatactatattacatataattccttgctacctttccatatttatagtctttatcataaaaatttagagaaccagtcattacctccgacactgaccctgtggaattaggtgatttctctgtactcccaaagcaaacttacaaactacaacaattattgtattatattgaaattataaatttgtatgtcactttctaatctctaaatgttgaactcaagtcaaggacagtgccttattcattgtatgtttctagtagtcaccccagtaccccaaacacagcaaggtacccaataaatacttatagaattaatgataaactaaatataattcatttttacatacttgaacagttcccttacattgccagtgaaaaataccagtgtgggttttgactttttttggttcagaaaaatacaataaccatagtatttacttgttcctttatcaactttgtaggatgaagtcatataaaatgcttaagaaactaaattgtaccagtcagtacctttatctttctagtatttaaaaaattggttatatgtgaaaagagccttcactttctaaatgtttttcttactcataactctttttgtgaagtttttgcccttgttaagcaaacaaggtctataaagaaatactaaaggaacttctctgaaaatcagtcaaactattgtaaggcccttatgtttagaggttgtagcaactcactcaaataagcttaagcagaagaagatacaggtattattgggatgcagaggatgtcatggagctcaaaggcaaaagtagagttgagctgttccaaagagtagaattgatttggaaagctgactggaatcataacagtacctttctcagtttttctctctgagatcacatgacgtctttacttttttccttgtatttgctttattatcctcactgtgtagcgaataggtttctctgatgcttgtgcaaaatggagcttagtcatctgaaagcttcaaagtttatgtgctctcctagttcatgtgctttttgatgtaactagcatcattatatcaaaatcctgggtgagaatcctggcccagctgtagttgagggcaaatctctgaagaagaaggcatgaatctgctatgaattacagcaccatacagacttgaataccaacacttcattaatttccctttctagattctgactgaaaatactgtgagaaaaaaaattgggaaagcagtacatcatttctgaaattaaagatggttatttgcccaaatatgtacaggattttgatgatcagactccaaagtctaattaacagttttaacttgagtagcttttctttatggaaaagaaagaaataatagtttcaccctcactaactgggagggatgaggaaaataagtggaagatccaacactgctcattactttcattctaaaacagctatagtgggacaaccaagaatgtattaggccttttcaagttgaaaagtggcctctctttaaatatagaaggctctttcctgacatagaaggcatcactaccagcaaggaatcctatagtcctggccacattcccatttatgaaggtcactggattacttacctgataatgtaaatatgtgtacgctaaatgatgtgaagagtttagtctaacagcatctaaacaggaaatgagaagggccaaagaaaaaccacttaccttatttggggcatttgtaaagttttgaaaagcttgtaattgttcttgaatgaataaaaaagaaaagcaacaatgtggaacctataaaagaggttatacaccataaaacgataaagttacagtctccaagaggtagagaatgaacttatatttagaaaatatttgtgcaggagagtataaacacaaaaaattatagatgccatctgtgttaattcttaaaatttcaagtgagcatggagttagtgaactaagacatgaaacaaagataaaacaagaacctagaatgaaaagattactggctgagaggcaggaatggaaaagaagcataatgttgtgataggaaaaagttgtaagaaataaacctggcatttttagaatataaagctgcattagaggcaataaaaaccagaataatcattgcagaaaagtaaattaataatgtgaagatctctccagatagaccctaatagaatgtagaggaaatggacaagataaaaattataagatggaaagtatgttaaataaaagcaggacaagaaattataaaagaaaataaaaggacattttacaaattgaatggatagcattccacagaacagagcagatatgatttatagaacagaaaagcagtaatcaaaaatatgattcaggaaaacttgttagttgaagaaaaacttgaatctttaaattgaaagacctcattttgttttgacaagattaacaaagatgccaatgcctaaatacatcctggtgagcatttggaatttccagcataaaaaaatgaaatccataaacattctgatgtctttgcatcttacaatctaacatgaagcttgtcctataaagaaaaaaatgcaaaattggagactagataacttaaaaatcttttgagggcagaaattatttaagatcaacagcaccttgaaatgctgaataaactgtaacaagtgcccctttaaatgaatacctgaatttaccctttaagtgaattctaatttaattaaaattaaataaattcccaaagtgcaaaaattgaagtggtaaatgagaaccagagctgtaaggggaagcatacttcaactgccctgaggacatttttagaccttggtggggctttcgtttaaaatggcctaacagagatggatgataggttgtttaatgcatacagtttaggatttcttagccccctgtataaagccaggatcctgcaaggatcataacctcagtgaaagcatagatgagaaaataaaacctctccactgacaaaaggagaaaataaggaagcttgtgtttcttggcttgggttcctgggaacaggggagggatgtgtgtgcatgtgtaggatgcctctcctgagaatttttaatcaagtgcctcctctcaagcaggtttcagtttttaatctgtattaattgtgtggtctaggaacaaccaataaaacacattatcagaagagttgtaggcttgtaacatatactctacaccagctaatacaaaatcctatactgggacacattctcagaccaagacctgcaggtttctcgcagataaagccccaatgaactttgtgttcacaatccaaaaacaaaatacacacacacttacacacatactgcaaatgatatttagatacaacaggattagaacctgccaataatgtcactagacatagtaaaattatcacatatgactactatattaaattagtgacataaaaataaatatgaggaaaaaatgtatgtaattctaacagagccttaaaatatacaaaacaaaattgacctatgtaggagaaattttatagatatagatagagaattcttacccagtaattgaagaatacataggaatatgtagaacacttacaaaattaataatatgactaaatgtattcaacaaatttcaaatgattgatatacaggctacagtatatcaattcttaattacttaactaccacaaggcaattaagttcaatcagtaataaaaagctttaaaaaaatcacacaaatgtatacatttggagatttaaacattttaaataacttaccaaataattaactcgtaaatttaaggtgtaactatgtatcagaacttgtggggtgcagcaaaagtggatatagagttaaattttaagtgctcaaattaggaaaaagaaagacattcatgatataagaaaacaagtttaaaaagccacatggttaatcaaaagaagaaagaaactgataaagacgagcaaagatcagtgggtggaatagaaaataaagatacatgagaatcaaaggttagtttatgggaaaatattttaaagtactaaatagaactatacctgttttaaaaattgaatcacagaatctttatgcagaacttaacaaaattaggactggagagttttacatacaagttttaggaaaccttcaaagaacaaaaacttcaatcttgtatggaattttccagagcattgaaaaagagaaaatactcttaaatgcatttactgattctagaatagttttacaagtcaagtataggaaaagaaaattagatacattttctctgaagttgggaataggaaaaggatgtccactgccattgtttctgtacatcattgtactgttagtcataacctgagcagtaaaacaagaaaaacgtggagagaaccaaattgtcattattcacaaatgatttgtgattggttacatagaagactcaagtgaatctaccaatgtgatttcagaattgataacagaatctggcaagattgccagatattaaaaaaatcaatatataaacatcgactatgttctatacatcagcaacaaacaaaaaaggtaatttttaaaaatctcccttttacaatagcaaccaaagtgctaaagaacctaggtataaatctaataaaagtgtaataagacctttaagggaaaaagtataaaattctaccgagggatatttacctaatctttaacaatcagacatgattttttatactcattagattagcaaaaaatggaaagtccaacattaacaaattttgttgaggatatagagcatcaaggatatggtgggacaataaattgatgctaccatttactgagtcatttgttactgccgaagttgatactgtgcattccttatcatctaggaatccattcttaactccatattgtcgggaaacaagacaaaatatttgaattcaggcctttctggaaaatccttgacatatgattgtagtagatataatactgctacaggaaaaagcctcattgaacaattaaggaagtaaaatatacttcaaggagcatttcaaagattgcctgggtcattagttttatgactataaatttactttgagttttcattacaaaattatgtaggaaacatcacgagtcaaacatggcatggatggcctacaaaatccatagcatccccagatggagagctgttgggagagaaggcatgtacatatgattagttgtgaatgaatacactgtgtgaattcatagtgtatccatctatccatgtagatgctagtcaaataagttaatgtatttctttctagaatgattatttaaatatatgtctcattaaaagtgtttatatttttccatataaaactatagtaaaaatttttatttttcacagttcagtgagtcagtcaattatgctgttcacttgtaactaagacttgatgaaaaattaacaagtaataaaacacagagaggaaagaagagtaaaataaattttgtaataggaagtgtaactttcattgcctattaaacttccaaatactcatatatatgtggctttagtctttatagaaagactaattaatcatcttagaaatcaaaggtaggcatagtccaatccaataaactgtacaattacaactgaagtattaaagttgttttttatactcgctatcatttttaaggttatagtgaatttagtttgaatcagtatgtttaatatgatgaggcaagtgccccttcagcaaagtgaacacaattattcttcagtttcaaaggacagaagatgataatttattaacatatttccagagaagagttttggttggttaaaaaaaaaggatatccaaagaatttcttgtaatccttatataatacatttttggtatgtatgttcaattgttttatcattctatttctatgtgcagtacagtagtgaacatgtatagatgggtaacttcttgtaggtatgttattttatgtgttatttaatctctgtttattctttttgatcaagcacgcaaatcatcagatgcatctggtaggaaaacccctttttttacagaataattctgttactttgattatcgtaagctaaatttttatgagatattttgtggcaattagaatattttgtgttgagtttttacaattctgtttactgaaaatatttttagtgtgtgtgtatgtggggagggggagagtatttttagaaataccaaataaagctctaaagaggtagatatttgaataggggtggaagaagatggactaatgcattcccctagatttacactttccagagatttttctgctgttatttaatgatagaacttggtattttcataggtaacttaccttagtttccatcctcttttgttctttctggcatgcactaaataattcttaaatagaataatgcttttattaaggtaaaagagggagatgaaactaatgacaaagtagaaggagcatgaattattatcttttcagtaacaaatttttaaactgttattacaaaaatgacactattaaaaacattattgcttgtggttcctaatattttatctttctctaatagaaaatttttaatagccctgttccttattccctacaaaaatagccatcaacatctaacatattgagacgtctaatcctcatcatccctcattattttatcctattcccctctcccttagcaaaagatcttgccttctggttcccggaagaaatagaatctagcaactgtgaactaactcagtttacttctgtttctacccatgcgttgaaaagcatcactatgccaaaaaatgcctccctgattcggcatctgcttgcctgtgcacttcatctcccactgatgttttacatgtccccgatgctgcagttattacaagtcagttgctgtttcctggataaaccatgctcttcttccatgccatttatgtaagatcgtctcagcctaggaggtctttttccccaactttatctgccagaggaattcttatctttcaagattcagcacaaatgctgtattctctattatgccttaccttactgtccaagaatttccccctcccagctctcacagcaccttataattgcctttgttgtagtctttgtcccattccattatgatgattcatgtaagcttctcatttccttaacagtggaaatatgtttattctttgtagtattcagagtctagctcagaatctgacaccactaaatggtgctcaataaatactgttgaaaagattgttaaaccagcactgaggaagtggaatgactgaaaaatactaaagtttttcaaaaggaagaaaccaggtgttataatgcgtaatgtctttcctacagtagattttgactgaataacagaactccagagatggtattgcaatagttacaggatatgtatgtcaatatttgcttcttaatattgttatgaggactattgttgtgagaacttaaagtttttgttagttgttgttttaaggaaaataagaaggttattgattttggcactaaacaatagttacttatttctttaccatttaatttgaagataacttatttgaatacatacaatcaaataattgaatttctacattaacattttatttctgtatatagtattctgaaaaaatgcgtattggtgacttcatgctaatatgttattcatataatttaatcattttctaatttattttttggacacaagcttgctcctcttcagaaatatctggtaggcaattactttttaataaaacaaatattacctttaaaattttttatttattgtttgcaagtttttattttccttataaagttatatatttttaagtatatcaagttaatgaaatattttcattgatgaaggaaatagtttgtttagttttgttgggttttatctatataaatgatttatattgtaatttcttgtgtggtattttagaaagaataactgtagcaccatgaaacagtagatgtacaaagtagtagaagaaagattaatacagtaaaagaaagataaataagtagaagaaagatttataaactcttaatacaaaatatgaatgatattcttttaagaattggataatggtatactgtgactaacaacatactctttttatcataagcagtaacctagtttatcttacacagcagtcaaaaatatctaataaatacatttgttaaatgttaatagtgaaacattcttatagtggaattacctgaattatatgggatgaagttatgctgtgcctgaattttcagtcagttttcctaatgtttaaaataaactttaaaatctgatttttaaactatgttctatgtataaatacattgaaaaatttgaggggggataagaagtaagttgtgtttttatgaacttgtgaaaatgcataaaaattgtctctcttttttttttcatctcttgaatgtgggtgaatgttcctgcaaacaaatcttgggtgaacatgtagattcctttggtatgctcatttcctttagaatgcaatgtgatagactatttaaatcatacaaacagaaaaaatatataattgaaaatgtatacttttgggaataaattaattttttgtgtgtcctcttttttgtagtatctactttgttcaattatttaccagtagagaataaaatgtgtttcagaaaaatcattctttgaaggatttttttcttaagaagagttactaatcactgttagatgctttggagataggtacctatggtcacacagctaggaagtattagagctaatattctaactcagatgttccaagctctgaaaccatcataataatttaagtggttaaatgtagatatggcttatatattagaacacaataagtaaactaaataattgagaacttcaaactatatgctttatagggaattctgggttgaatgtggagcagtatttgaatctggctgtctctgtcacatcttattttattaattatctgccaacactttatttcagtggatagaaattttttaaataaccagagaagagaaaggcatttagaagttacatccaccaatatctaaacataataaaattcaaagcaaatgcatgtggttctagattgcttattgttttagggttacacataatccaatatattgtgaaatattttatttttggtagatttgttattaaaagatgtatattttgattaacttatatttttacaaataattatgtttatctttgcatctacatagtacacataaaaactagagatttcatatgtgtagatatttttatatgaaaaaaaatgtttcaggaacaggttttcctcatagaactatttaataacatcatacttagtgcccatcctttaatgtactcgaaaagaaaatccctttatattttgaagtaattcacaaaatataataatatatttgattaatactcatttctgataattttcacataagacctttataaaaacttttccctacttttacagtattatttgacagtaaactcaggaatattgatgagtacagagagtattttaaagaatttcttgcatattctattagtgaataaaattaaataatgccggaaatttttcttttagcttatcaccaggcagggaaaaggaatttttttcaacttaccatctttgacaaatactgtcagtccttcctttgatcagttacttttttcttaactccagatccacttagcataaagtgacaggagaagctgaaacaggatgttaaagttgttttttttaccttcccttactcttttctttgtctctaaattatttatactcatataggcatctggagagtttatattgcaacttgatgtgcaagttctataaataaaagataactaaaaatatttttcagaagaaacaaggggtatattttgggaatcacaagttgttttttcttaaatgccacagtgcatgttgcaataaattatgtttttaatttaatttatagccatcatgtccaagtgaatgccatgtgcagatatgtctgctccatgcaaaaaaagaaaatcttacctataaaattactctttttctgttgtaactagcacattcatttttagaagcaaggatgacttgaaccatcctaaattccaagaaaaaataacaatttggccggacacagtggctcacacctctaatcctagcactttgggaggctgagccagaaagttcacttgagctcaaaagttcaggacaagcctgggcagcacagttagaccctcatctctacaaaaagtaagaaaattagccagacttggtggtgcacatctgtagtcccagctactcaggaggctgaggcagacggattgcttgagcctagtagtctgaggctctagtggactgtgatcatgacactgcactccagcctgagtgacagagcaagacccagtcttaaaaaaagtaatagaaagaaaagagaaaatgtaagaatttgccacccttaatccacccctcaggaagaattagattatatttggatgattaggtaaaattctttgattcattgttttagtgcatgagattttcctacaatgggaaaattctaagtttaaaaattctttttctcagtttttctaaaaaaggcattctgagagtattttacagtaaaatacaaaggacagtttatagaaagtactaaaataatgtcttcagagattcatactctaatgttacttaaaaactaatgtctgctcttggtgcctgtcatcatcattttgaaatctcaaaacatttaaaatgccaaaagcctttttggttagtaacagtattttcccaaaggtatgacattggtatgacatttataaaggaggaaaaataaagtatgttttaaaataggtacctatctcacttcaatactactgtatcattgagaatcttaaagaatttgtgagcccttcactagtatagtcaggttttattcttatacctaaagatatgaacaacaatacattttgttaatgctattttatctctttggaatatttttcctatttgtttttaaacatctgaagttgttttctaagatagcttttgaaaatggggaaagttttaactggttcatcatttaatttacaaatttaaaacttcaaaccatagctctataaaataatgtggctattttatacccacattattaatcaatatacaaacacttggttttgaattgctttactttagtgcattttaaattgggtattcagacatttagtttatgctgcaaatttagaatgagattgttaaactggattttttgttgtcgatgttttgttctgtttttaagtctttgttggtgtcctttatgtgctagtctttgcttttattttttccctttgccattagtaaagagaacacaaatctaatacataacataaatccttacacctgaaaacagctctttatcaagatcaactatttttgaaattccacgaatcagtaggttaatgttctccacatgttttcaattcttgtatctaaaggctccgttaatattactgatggcctttttacagtcactattttgtcctaaattaatttctgactttcttacattactttctagtatgttttcaggaacagaatttttgttatgacatttgaaattatcaaagtggtttctttatagaacaatattagagaatcttagagatttgagaaggttcttagagatactaaatagctctttaatgtatcatggtgataaatatacattttatcacaatagatgacatgtctttttttaagtgagaaaaccatatgcaatataaatattcttatacagaatataaatattcttacaagataaatttgtttttatatgtatattttcagtgaaagagtttctagccaaagccaaagaagactttttgaaaaaatgggagaatccaactcaggtaaggaatatttagatttttctaaaattaaaaatcttgtattaataaaatcaggattcttgcctaagaaatttattactttagaaattttaattttcatgtggtgttagtaaacagaagcttaaaatgggaattttgccatagttatactttgatgtattaattaataatcttaatgtatgcctaaattgcaggaaataatttccagtataatacctaattataaatttgatactgattccagttgctataaaatcttaatattttcaaatatattaattttgaattatgcctttgatagcatacttataatttttattaattacaaaaataagagtccttacgtacagtttaaaattctcagtcatagagaatttggctatcaacaacatccctgatacacaggcatcttttttatcatcattttgatgggttatgttctatataattaaagtattttagatcttaactaggatctaaaaactgtatataaaaaaccatctatactttacaaaaataatatttttggagttataaataatgaatgaattttaatagtaaattaaattttgttatacttcaagttctgggttgcatgtgcagaatgtgcaggtttgttacataggtataaatatgccatggtggttgctgcatccatcaacccgtcatctacattaggtatttctcctaatgctatccctcccctagccccccaccccgcgacaggccccggtgtgtgatgttcccctccctgtgtccatgtgttctcattgttcaactcccacttatgagtgagaacataaagaccaaaaaaaaaaaaaaaaagaggtcgttatttgaaaaagatacttgcacacgcatgcttatagtagcacaattcacaattgcaaaatagtggaaccaatgcaaatgcccatcaatcaacgaatggataaagaaactgtgatatatatatatatatatatatatatgtatgatggagtactatgcagccataaaaaagaatgaattaacacatttgcagtgacctagatgagattggagactattattcaaagtgaagtgaaagtaactcaggaatggaaaaccaaacatcatatgttctcactgatatgtgggagctaagctatgaggacacaaaggcataagaatgatataatggacttttggcacttggtgggggagaatgggagggaggcaagggataaaagactacaaatatggtgcagtgtatactgctcaagtaatggatgcaccaaaatttcacaaatcatcattaaagagcttactcatgtaaccaaataccacctgtaccccaataacttatggaaaataaaagaaaaataaaagatattataaccaaaaaaattaaattttgaaagtcttttctgcctagctcaaaagtttttatttcaagtattttctcactaaagaattctaagtaaatgtttcttaaagatgccattactatcaagatttagagtatgacctataagttaaaacatagccacaaagattaaacattgtgattacaaaatgttagacattgtgtaacatgaaacaataagagaggtaaggaagataacatatttttataatacaaagaaaagcaatgaaaaaagcataaagagcagaaacacatattctgttgtctattaataaagtttgttttcattatttggttggtactatggtaaacattttaatccatccatgttgataaaacctaagattaaatattaattaaattaattcagtcagaattataagagctttctgtgttgataaaaaaatcttatgactacttaaaattattttaaattttaagctgtgaaatcaaactatgatgaaaacaagctataagtaaaacagaattgcctgctgtctgtaatgatccaacagaaagctaaaatgggtctcaaaaggcaaggtttgatttgcaatacagataaaatccaactacagtgaactgtaatacctatacaaattcctcactggacaaagaatcatactgcatcacattttttcaagctaaacactacatactgggccttcagaatatttttctgatattttcatggagttctttgcaatgaaacctattaaacaaatgggtcagcaattactacttcttgccatttaacacataatttgtccctaataattttcattttgttgtggcaggaacaaatttaatagattgatgcctccaattatttgcttctgtgctgtagtcaaagccaaacaaagatgtttccttataacaaaacatctattcaagaaaaaaagagtctgattattgttctgggattctggcttttggttctttgtagaatgaggaactcttctttccttattgttgttgttttagataatactgtgtttttataatataaagagagaaagccactaggctctctcatgctgctactatctagttctataagcttatataaagacagaaatgaagcaagactgatttcttcacaggtaactttagtgaaagagctctgatccctcagtttatctattcattacagttatttgcaagtgcattaagtctgtatggcttctatgactctttgtcagtatgcctctggtcagtttgtaattattaaaatatgaaactaatttattggaagttcagtagtaagattaaagtccaatactaggaatgcatactggaatataatctttaatatttcagctgaggctcttatttcctcctattactattatgctctgttttccaatacattctctcctcagatattaaatactttcttattcaaagggaaaaatagaaccaataaactggaatctcaatagcttttttgtattgcatttaaatggatagttataaatgggattatccattatgattatgtattattaaagcatttataattcccatagtgtttttacgagaattttaaattttatttatgtatttacatatagaataatgccggacttgaagattttgaaaggaaaaaaacccttggaacaggttcatttggaagagtcatgttggtaaaacacaaagccactgaacagtattatgccatgaagatcttagataagcagaaggtgagtgtatttgttgttatttaccttcagggtaaactttagttttatcagctagactattaaacagattcagtataatgacttaccattgacagcttcaaataattttattattaaatttaatttttattgtaactaaatttttattgtaactatattatacatagttagtatacagtcagcccttccatatctatgggttccacgtccatggatttaaccaatcacagattgaagatatttgggaaaaaaattacatctatacctaacatgtacagacttttgtttcttgttattattccctaaacaatacagtgtaacaactatttacatagcatttacaatatatcaggtattataagtaatctagagatgatttaaagtatatggacagtgtgtataggctttatgcaaagcctctgtcattttatataagggacttgagcacctgggcattttggtttctgctgtaggtcctggaaccaacccccagggatactgatggacaactataatttattgtgacaattatggactaatttgttttgtaactattacagaagttaaaatgtgtacagtagtgatccaaccacttcatgttacaaattttgaaaacctgaggcccaaagatttgaaatcatctcaagtcagaaagttagttaaataaaaggcctagattaaaacacaaatctgactcctactcaatttatttgctcaatattatcagtatactcctaattttatatattaatacctggctggtatctttaattacttttgttatttatatttaacttcttgacttctgtgactatcctcacattgaccattagactccagcaagaaagaatgccaccttctaatgatttacacatatacaagaaaattatttatatgtcttgctaaagtcaccacttcttaaattcaaaatagaatcacatatggaatagaatcacagtcttcgtgaagtcaagataaattactttccccttctattaaatagaaaatctagaggaagcttaagtctaaatgacctaggatacaaagatagtttttgttataaagatagttttttccccaatattttgtgtgtcctcttctatggcaatataaaataaatttttagaatttatacctatatttatttagatattataaaatgaaaattgttcatttttactcactatttttcagttatggactttctcttcatttttaattttcttattcatcttctgaagtatttaaaatcactatctacttattgcagagatttgagccagcttttatagaggactttaagtcattaggaccttagtattttcacattcatttttaaattaccttaagtaattatatatttatttaagcataattgacataactaatttttaaagtaatttcttatgagtttgtttcttattcctacttagctctcacttcttaattgaaaccataattgaccttcctaagaccaagttttaaatcctctattaggttttcatttgaatcctattattaaaagtaatggcaaaaaccgcaattacttatgcaccaacctaaaagttggtaattgttattatcttccttatccaattctaacaattttgcttatccaagtttattactatatggaaaacatttttttaaatgataactttttaattttgcttaaatacattaagagatatttatctctcaattacaggttgttaaactgaagcaaatagagcatactttgaatgagaaaagaatattacaggcagtgaattttcctttccttgttcgactggagtatgcttttaaggtaaattttagtaatatctaaataagatattttcaacctaaattttttttaagatgaaactataaatggattctaaaccagatgataagcctgaagaatatgaataaacaaaacgaatacctctagagtttgtgtaattaaatcctattgtgcttataacttaggtaacgtttgaaaaggttttgattctccctggggaaattgttcaaaggtgatactcatgagatggtattacaaaaagaaatatttcaatttatcaaaaaccatagggatatcttaataacaattcttatgcaaattcatacacccaacacattttctactttgattaagccctttttgccactatctcatcttcttttacttagtaatttgagttctagtcttttcacttatacaaagcaaaatttttgttccactattcaaatgtctgaaaaattgtaccacatttattatttaaattggtcacttttgagctctttggaatgatactggcatctctctgcaatattgaatcatatgaaacattttaatcttttttctcctttattctttaaattaaatgaagacctatgtatttaaaatattaaaaccattaatcttttatacataaaatgtaaatattcttattaactttttaaattgttttttacctttgttattcttttgcatatattataacgttacttcattgcctgagtatttaattgtttgagaactagatgttctctgcaagaaaaggaagagcaaaagtcccagactagtttgtggcaaaaataactaggaggggaaaaatatgagtgtctctgtatagaaaagctagagcatgttccatttattctttatttctcaaggttattaatctgtcagagagattttaaatttttctaattcagcattatataatattaaaataattttgacctaagttgaataattgtatttcctttttatttgttcataggataattctaatttatacatggttatggaatatgtccctgggggtgaaatgttttcacatctaagaagaattggaaggttcaggtaactaatggttttgctttcttcaaatctttatatgcttgtgttgtttaaccagatttttaagttgatgccaatgccaaaaacttattttgtttgattaatattttggccatatgaagcattaggtggaaacaaagaggccacatcatacacaagttttaatataaagaatataaaaatttaatataaaaaaaggactttgaagccaatttaaatgttatactactgctagatattgtgagggtccactacttgaagagttttcagaaaatggaaaaattaattgaattttaaaatatcaatatttattaaacaaagattaataatacaactccaggacagaggattgttttaaggatgaagatggaaaataaatatatagagaaataataataatagtattatggtaataagattataaaagtttgtttttcacaaatttaattctccttaaagttcttgctaagtttagtttttaaaatatacacataatttaacgggagtttgtacctcatcaggttatgactaataagatctcagagttattaaaataggttatagaatctgatggttttacctgtacttaatagtttataagcttctaccgttcattaataatcactaatagaataaagctaaaataaaaaacaggtacagcttcattcagtatagtgtgttgaagtcaaaataaaaatgtagagacaaatctctaaattcaacattttattgaggaagcaagaattgcagtttgaggcatatacacagactaggtggtcttcaatgtgtctagaaaacaaagaaaaggttggaggttttataaaaagaaattttatgtttatttgttttgaaacaaagtttactagcactagttaagttttggggagctggcaagctctgattggtgagtgatggtggtgggtcagactcgtctaagagtcgcagtaggttgtctcagtagctgttagagaaaactggtttcaggttacaataggcagtttcagcaactagacttgtggaaaatataatttttttgtttgtttttggttttttttttgagactgagtctccctctgttgcccaggctggagtacagcggcaccatttcgacttactgcaacctctgcctcctgggttccagtgattctcttgcctcagccacccgagtagctgggactagaggtgtccgccaccacatccggctaatttttctatttttggtagacacaggttttcaccgtgttggccaggctggtctcgaactcctgatctcaagtgatccaccctccttggcctcccaaagtgctgggattacaggtgtgagctaccacacctggccttaattcttggagcaggtgctgtgtgccctgagtgcgttattccctggcccctcgactctgatttagttaggtatgatgagaatgactaatttgtataatcagctttcacatttttcccttttgatcaagatctttctctgaaagcattgcttgtcaaccatcttgaagttaggcttaattattccttggtgctcggatggacttgttctggttgtctctgtcccacatatgagagaagttatctgttggggggtgtctatgtagggacctgggccacattcaagtaacgaggaggccagaaggaaaatttttctcaaagtagatttttgtctggagtccagccagcatcgagttcccacttatcacttccataggtattagcagtcatctttaagtgttgggctaacgttattctgttgggacagctgcctttacaaagattagataggcactaagaacaaagcttacaaatgatagtacaaaaaaattaacaatatagtaaaatgtatttgtgcagtgcttttgaactaaagcccaggcctaagggcaaaaaactaaagaaatcaaaggaccaggggaaactggtgagacctgctatagccattgactaacattttatgactgggttgaactaaagcagagaatgccaaactttgcaagagggaccaccagcacaaattaaacaaaaaattgtgttaaggatattgtcgatgttgtgactagatgaactgaaagaatttcttaagtcaggctttgtcaatggctttagcaggtctcaccagtacctatagcagttactgattgtgaattttaaattacaatattatttggttaagtgaaaaagcaggcattaagaggggtaagagtttcattacaatatggagtcttgttctagtgttttgagaaaagctgttcacaccatggaaaacatcaactttcttggctttgtttacagtgtaaatgtctctggctatggctttgggcagtttgatgaactttctgtgtggcccatacatcaggcatgagacttgtttcttaaaatttatatagtttcagctaacaggacttcaggaacagagcggttctcattttagtaattttatggaagaaagttcgattggaggaacctagaagaatttaggaccttgtctagtctataggtagataacaagactcaaaaataatgtacagacttacagtctaataacaggtatattatagttattctttagaaaaaacttttttctctacattgattacataggaatcttggatttaaaaacctcttgaggcaaggaagccgaaccaaggcagtcttagattttccttacagtcttgaggttcctggtcctgccaggaagtaacagtttttatttactcattgtaatgctgagaaacccttgaagtcaggcattttatgcactttttaaatacgatagttcagttagagccttagtaatataatcagtgttttcatattctgctataaagagagagcagatttttactggacctgtgcaaatagtcatattcccataaaagtacttacaactaatttttgaattaaggagaaaaaaagcaaatgcttttatctttttttacaaaaatatactttaccaaattgctataaattataaatagctaaagagataagtttttttaaatctggaaaccaaaatatttaagaactaacaatgtaacaatgttttaaatgaaagttatgaaaacattatttttatcaattatttaatttcatgtaatttttgttctgcttgatcttaattagtattttcatatactcatctttttttattagggttctggaaatttttatttagtctattgatcttaaagttattaaaaacctgtatttaagggtacttgttggggtcttttctatgaatctgattgtaaataattttgagaattcaaaatattaactctggatgacaaaaatctagaatagccatgggtaaaaatctgatgaaagtttacaattaacaagtaaaattagttatttctattttatctagcattttaagacaataaccagaattatgaataacgttaatttctctgaatttatataatttttgaaacattcatatgaacaacatagccataaatgcaactaaaagatctagtatcacatcatttatacaatctcttatataatttaaaaataaatctaattatttaatacgtctacaagatgagatctgtgtcttcaaatgttttccaagggcccagctggaaaatcccaaagctaattctagattaagaacatttaatttaggatttgatttttgggaagtttgttaaacatcttaaaagacttaaaacccttggtcaaaacggagtaacaggtcactgtaaaataatagtcatttatttaaccagagtgataatcaaaagacatcagatgtaatacagaaagttatatgaatgtgaaaacttttattatttttaaagctcagtttttctgagtaatgaaaaacctgataaagacaacataggatattatcttgataaaatataaaatctagttttttagacaaatcaccaaaatggtaaagaaaaatcttctgcagtatgctcattatttctttttcccatttagagctttccattaaaaaaattaccaatcatctgaaagttgattgagtacttgaatttaatcagacacaggaagaatgtgtccagggttattgagtgtacactgtgttatagaaaaatatgaacaagaagaggactatcttgagcagggaaatacatggctctcagtaacagcatgagaaatttcctggttacatgaaataatacagacataccaagaagagccaagaatacagattcaaattatactgaaagaaaacttcgtttttctaggcctttaagataaacgtttctgcatcaggccataacaaagttcaaactgaaaaaaaaaaaaaagttctaggagttgaggaaaaaggttgaaggagggagttatcaacccagccaagcaaaaagatatacctttcaagaaagagaaggggatgtatgaccttcaaatcatgtgtagtgtgacacagcaaaagccgaacttctgaaatataaatttcaaaaggaaaactttacctcaagaaatggaattactatttttaatgaagaggacagcatttcaaacctaaaactagggaaattaattagatctcaggaagaaatgtggcagaaatagaaattgcactttggaagatggctgtcaaagaaacagattttataattaaaaatcacaaccttttgcagtattattgagagcagatcaatacttcaagaaagttttgtttaaatatagagagcaagattctggtcctttgtcagtgcacccttgacaccaatcattaatttttagaaaaatatgtaaacaattttcctttccaatttctttccctaactatttacacataaaacttttttcataaggtccatcctttcatttttccaaacccccagtcttaatcttataatttttcttttcttcttcctccgtttttggaacagccaatcattttactttaggaaaaatatttaccacctaatatacttttcatacaacatatttttttcttacattcatattttgactactagacctcaatatacttaaactttttatagaacttaagaacccaataagggatttatatttatttagcaatttgttttagtttttaaacttatttgttatggcccagacatctaataagtatcttattatttaatttaatataacataactgtaagactttaaattacatgagacattgatttataaatgtttatttaattaacattcacctaatttattcatttttattaattatccctggattacttatgaaaattgagatattaggcagagtcgttattttaagttatttttattagccaattttatagcctgttaatatcaaatgtttacctaaataagaacttaaagttagatacatgaatattctttcaataactcagaagatacacgtttattaaatcagtaatattaaatcttatttatcaaataatagcatatacaaagatcattttgttttagtctgggtttatagcttcatgaccttaagaaatttatcagaggcaaatataaaactctctgaccaggaaatctaggcaaaaatctgtgttgacaattttgaagacatttctcattttattttgttagtaactttttagtatagttaagtcttgttgaattgaacccttgatctttatgtaatgcccttctttgtctttcctgatcatttaagttctgttttattgtatgtaagaatagactcctattcttttttgttttccatttccatggtagttctttctccatccctttactttgagcttgtgagtgtccttataggtgagatgggtctcttgaagatagcagacagttgggacttttctttttatccagctgccttttaagtgggtcatttagaccatttacattcagggttagtagtgatatgtgagattttgatcctgttattatgttaccagctgattgctttgcagacttgattgtgtaattgctttatattgtctgtgggctatgagcttaagtgtgtttttgtggtagcagatattgatctttcatttccatgtttaggactcccttaaggaccacttgtaaggctgatctggtgataatgaaattcctttagtgtttgcttggtgtctgagaaagattttatttctccttcacttgtgcagcttaatttagtgggatattaaattcttagatggaattttttttctttgaggatgctgaaaataggcccccatctcttttggattgtaaggtataagctgagaggtcccctgctgatgcacctgatggaattccctctgtaagtgacctgacatttctctgaagctgccttcaagttaaatgtggtatatatacaccatggaatagtatgcatccataaaaagaatgaaatcatgtcctttgcagcaacatagaagctgctggaggtcattatcctaagtgaattaacacaggaacaaaaatccaaatacttcatgtttttacttttaagtgggagctaaacgttgagtgtacgtggacataaagatggaaacagtagacactagggactactagagaggagagggagggaggagaatatgggctgaaaaattacccagtgggtgctatgctcaccacctggatgataggaacattcataccccaaacctcaggatcatccaatatgcccatgtagcaaacctgcacatgtactctctgaatctaaaatataaattttaaaaaataaataattaaaaaaccaattaatttatcaaagatgtacttaagtcatgtgaactaaaatattttatataagcacccatttatccaaatagaattctttaagggatttctagacaactatgtcagatattattatatagacacagcatacaatatatgtacatatgcataaaagcatctaaacacctatactaatgtataaataaaaatattacagcttttattttagaactttaatcatgagatagtaaaacaataagcacatcagtttataaaaagagttagatccaaattatttttctaacaaaatgggatgaggctaaactttaagctttttttaataggtaatattatgaagtatgtgaactaaattataggtagagtagtttgagtcagttagcaatatactggaatagacaaagaactgttaactgagaaaatgtgaatgaattatgtgaggagacccaaatgataggagttattctaattaggtctgtacaatattttcttgtctcaattctttgtccctgaaggtaagattgttgccatttcttttagtatagggacagtgtcctttacattggaattttatcttaaaaacaaaacagcatgaaaatcacaatgattttcttttttatctgatgattttcaagtgtttttaattaaataatatgccaaaatagctgaggatttttgggaaaaaagagtttagtctagattaggataaagaagaggaattgtaaacgtggagggaaaagctccagaagggaacttgtctccgctagctttgagacagtattttgtaacaaggcaatctctgagtcctgaaatttttattagccttaagatatcagttgagatatgagtcttatttggagtatatgattttgtcaccatggtcttttagttttgttgtaagaacaacagactgtttgaatgattcctataacgtttgaacatgttaccagctggagtctcagaaaatatcttggcatgccttcaaactttgagagcctatttttaactaaatgtatttaggtgattcggtttaatgccaaatacgtaagagccaactaaacacaggtgctgaatacacaaggccaaataaacacaagcaccaacagaaaataaagtatgtccttaccaggaagaacaataagccttctccaaatgaaggggaaagtctcctcatccaaacctcaaaactgaggtctaaaccttacacctgaagtcaacagggggaaaataaccctccccaacaggagatcagttaaccaggaggcaaaagacgcctctcaaacaggagtgggaaagagaaagaccccttcccagccaaatcccaaataaaacagaactcaaccaaaattaagagtttagtccaaaagagactcactaaggggaaaagaggggactccccagaagcagcgggactgaaagggctccaatgggggtacttcatgctgtagttcccagggccagtgattctccctgaagtatgtcagctttaggatcccacttctgacaccaagtatatcaaagtcaaaataaaaatatagagatgaatctctagatttgatattttatttgggaagcaagaattacaatgcaaggtatccacacagaccaggtggtctttggtgtgactgaagaataaaaagaaggttgaaagttttataaaaaggagaagttttacgttttgggacaaagttcattggcactagcaaagttttggggagctggcaagctgtgattggtgagtgatggtggtgggttcaaactagtcttagagtcacagcaggttgtttcagtagctattagataaaactggcttcaggttacagcaggaagctttagcagctaggcatgtggaaaatttaattcttggagcaggtgctgggtgctctgagtgctttattgccctggcccatcaactctgatttagttgggtatgacaaaaatgacccaacttacacaattaactttcataattaaatactggcataactaaaacacaagtatgaactgaaacaggactgatgatggtaatttgattcataaaatgatggtggcagactcagaatatcacaagatgatatcaagtaatgagcaaacattggagtcattttaattacccgaggcctaagccaagattcatttattgacttactatgcacagggcaactaatataattaatatagtgtcaggcactgtgcaaagtagcttctgcttatctttgagaattttctttcctctcctatcgtcctctctctcctactgccccttgttcaagcagaatcctcatattgccttatggttatttaaagtttacactaaagtaccacacctgaacctgttctcaaaaaagtttttgttaactttatataattggtaacttcttttctttgcaactcctcacagtcttagtactctttgatattgactctttaatacttgacttggtactaaaaggatagcaagttgattgaaggaattcacactgagacacttgccttatctcatctttcacaagtactacatatacacttgaacaattgccagtgtccatcttagaagttttgaggcaataggaatatgagttattgtttagcatggctttaatcagaatcaaatgaggcattataattctctacttaaagctgtctggacttaaaactgctacagcattagcccttaccattgtcttcctacattcaattaaatattaagtagaaatacccaataacactttgcacttggaacattttactttcacctttcaagaattcgattataggttgagcacagtggctcatgtaagcctgtaatcccaggacttttggaggctcaggcaggtggatcacttgagctcaggaattcaaaaccagcctgggcaacatggcaaaccaaaccctccacacacacacacatacaaatacaaaaaattagctgggcatggtggtgtgcaactgtagtcccagctactcggtagactgaggtgggaagattgcatgagcccaagagtttgaggctgcagtgatcatgctacagcactccagcctggtgacagagtaagaaaaaaaaagaattttattatagatctatgtaatgtatgtgttcctccaattaaacaccagcatatggaaattaatattttataagtaaaaagtaatcatattaatgacattttacatttacagatgcatgtaaacgtgcattttatgtttacagatgcatggataaagtaagaggggacctcccaggtcagatgtttcccagtttaagcataaatgttgcaatgaccagaatgattattttaatctctgcttacaatgttctcctcattccttgtcatttggcatacaatgtggattgacagtgttgggatgaagctgaaactggaagggtattataaaattttgctccccaaaagcatttttctttacatatgcattctttcaacaaatatttactgagcacttgggaaatgcagtgacaagcaaaaaaaggcagcacataaagtcttttgttggaatttgtatttctcttgctaccagatcaaattcataccaaccatcttgagggaaatcctattcatagttaaggttgttcactgaggaaacaaatctgaaagtcattgttatttatcaggcagattagtagaattcaagtaatacattagaagataaattagaaactcagaaaattggtacatccttttggatttttcagattctgacatcaaaattacactgatctattaatctaatatatacataaaagaactagctgggtgcggtggctgactcctgtaatcccagcactttgggaggctgaggcgggtggatcatttgaggtcaggtattcgagaccagcctggccaacatggtgaaaccccgtctctactgaaaatacaaaaattagccgggcatggtggtgggcgcttgtaatcccagctactcaggaagctgaggcagaagaatcgcttgaacccaggaggcggagtttgcagtgagccaagattgtgccactgcactccagcctgggcaacagagcaagactgtgtctcaaaaaaaaaaaaaaagaactgtacgtatttacactaacatagagattatacttatgtctgtgaatctatgtaaacaagcatagtaaaagatttggaaattctgatgccaagattgtatctatggtttctgaataggtttatgagtattcattattcttcatcaatattttatgatatttttccataacgagcgtatgtcatttttgtaacaggaactattacaaaatgggtaaaatggcattaatctgcagataaatgcagctaaagagcttctacatagggaaattctataaacacttgaaatttgtgagaaaagtagatggagcctgttaactatagcagtggccccgatagacactccatttggcacatttgctttccaattattctcaagatcagacataattagaaagacatcaatatatttaaatatgggcaataatgattcacaatgagctaactattttaggtttatatttttcctcaacatatgcttccccataaatttatcagagcgttatttgaacaaaatatagagatttaataaatatttgaaaagtaacaaggttctttacatactttttaaaaaaatactttttgttcccaaagtacctctacttcatattagtttttatgcataatctactaattagaatgtattaactcatttttacagaaaatcaatggttttatttctttgcagtgagccccatgcacggttctatgcagctcagatagtgctaacattcgagtacctccattcactagacctcatctacagagatctaaaacctgaaaatctcttaattgaccatcaaggctatatccaggtatgactttaacacattatgtgtactgtatatgagaaaatactaggcaagacattgtatgtatgtaaccccaacttggaattttttttgaagaagacactttctcctaatagtttaagtagagctcagagttttgctgctattacagagaagcaaaaatcctgttatgaaaggaacttgtttatatctccattaatctatagttgtgaactgagtatagcctcttgcataaggagatattaatagctaaatctatgagcagttattagtgccaggcatattccacttgttttacatgtattatttctttaatcctgataaacctatgaagtggaaataccattgttatcttcattttaagattaacaaaactaagacatagcaaggtcatttagccaataaatggtagagtcagaatttgaacctaggcagtctgatcccagagtccatgccctttacgactacaatataactgccaaagaatccctgactaccaatactgaactcgtagcaacgttttctttccacttctactactaataaagtgggagcatttctttttacacaattattgatagattctcccattgacgtttttacacttctgatggtgcaactaatggcagaggacacattggggtaaggcagacatttagcattgtttcatttttattaatgctatttatttttaccttttattttcacttttttattccttgggtctaggatcttataataatgactgaaaagagttttgttgttattaatttgttccttttctttgagttgaggaaggatttccaacttggattgtttaaactttcattcactagatattcatgaatgaatttcaattacgtggacttaattttttttccatttctttcatagtttcaatttgaattttaaactttcaacgtaggtgcaataaatacatttattgtgaggtaatacattttcactagtattctttttttcttttataggtcacagactttgggtttgccaaaagagttaaaggcagaacttggacattatgtggaactccagagtatttggctccagaaataattctcagcaaggtatattcataatatcaacacataagaagtagaaatatgagacatgcatccctatggacttttgtaaaaacagtttattgatctaattttacatttttaatttgatctaagttatgaatttaaatctatttgtgcatgattactaaagaattattatttagcatctaccactaatcctgtaacctctgtcaattttaactctgggtcttagagatataatatgaataaatatgacctctagatccatgttttgcaaccaaaaacatagtcttttcttaattattcctagtaacggaagggtagagaagacttgctctggattataccaagaggtaaatctagagatgatatgtactagttgtccattctttctttgtttcaaatttaccagttaaataaaaggaatgtatgagaagtgtttttaaattttaaataggactattaacagcaattgaatagttttagtcttattgaaggcagctctgcttttctaaatagtgaaacgtggtgagagaaactgtacctatatccaaaagaatggttaacttttcctctgccatcacttggtggagaaatctagaaaggagaacctaacaataaccaggcacaaataggagagaggaaaaggaaggggataagacacatgcttcactggttcccaaatggaatcattgaaatatggctaacttatagaagtgttaaaataaaagatttctttcaacttttctctcattatctttcataatttaaataatatgtaacttcttgatattttataatctaaatatcattgtagttaacacatttctttaaatacagttaacaaataatgggacaacaaaatgagcactaaaacttttacaaatgtgtatatattgtaaaagtaatactcattatacaaaatttagaaaatacagaaaaacataaacaaacaaccaaaaaaaaacctatatgtaatcccaccaacctagacgcagcctttttaaaaacattcatatatgtatgtacatatatgtatatatgtgtatatgtgtatatatatacaccacatatatgtgtatatatgtgtatatatatacacatatgtgtggtgtgtgtgtatatatgtatatgtgtatatatacatatatattcatatatatgtgtatacgcatatatgtatatatgtatatgtgtatatatacatatatgcgtatatatacacatatatacgcatatgtatgcatatatatatgcgtatatatgcatatatgtatatatatgcgtatatatgcatatatgtatatatatgcatatatatatatatatacacacacattttagctttattttagctttcattttaggttcagggatacatgtgaaggttggttacagacgtaaactcatgtcatgggggtttgttatacagattatttcatcactcaggaattaagcccagtacccatagttatcttttcttatcctctccctcctccctacctccaccctcaagtagaatccagtatctgttttttccttctttgtcttcataaattctcatcatttagctcccacttacaagtgaaaacatgtggtatttggttttctgttctgcattagtttgctgaggatgatagcctccagctccatccatgttcatgcaaaagacatgatctcattcctttttatagctgcatagtattccgtagtgtatatgtaccacattttctttgtctagtctacaattggtggacatgtaggttgattccatgtctttgcttttgtgaatagtgccacaatgaataaacaaatgcatgtgtctttatgatgaaatgatttataatcctctgggtgtatacccagtagtgggattgctgggtcgaatggtagttctgcttttagctctttgaggaatctccatactgctttccacaatggttgaactaatttacactcctaccaacagtgtctaagtgttcacttttctctgcaaccttgccagcatctgttattttttgactatttgtttatttatttatttatttatttattttctggagatggagtcttgctctgtcgcccaggctgcagtgcagtggcgtgatctcggttcactacaacctctgcctcctgagttcaagcgattctcgtgcttcaggctcccaagtagctgggactaccggcatgcactacaacacctggttaatttttgtattttttagtagagacagggtttcaccatattggtcaggctggtcttgaactcccgacctcaagtggtgcaccctccttggcctctcaaagtgctgggattacaggggtgagccactatgcccttccatttttttactttttagtaatagccattctgactggtgtggaatggtatctcattgtggttttgacttgcttgcatttctctaatgatcggtgatattgagcattttttcatatctttgttggccgcatgtatgtcttgttttagaaagtgtcagttcatgtcctttgcccaccttttcatggggttgtttgtttcttgtaaatttgtttaagttcctcatagatgctggatattagacctttggcagatgcatatggtttgcaaatattttctcccattctgtaggttgtctgtttaccgttgatagtttcttttgctgtgcagaatctcttcagtttaattagatcccacttgacagtgtttgcttttgttggaattgcttttggtgtctttgtcatgaaacctttgtccattcttatgtccagggtggcattgcctaggttgtctttcaaggtttttatactccggggttttgcatttaggtctttaatccattttgagttgatttttgtatatggtataaggaagggatctatcttcagtcttttgcatgtggctagccagttatcccagcaccatttattgagtagggaaacttttccccattgcttggttttgtcagctttgtcaaagatcgggtggtcgtaggtgtatggacttatttctgggttgtcatagttgaaatcatagtaaatatatatagtcttgtctctgacttttttcacttttataataacaagcatgcaaacatcattctaatggcttgtttgtaaatgtaccataaaatatgtagccactcttctatcgttgagtgttcaggttttatttttgatttttttattattataaataactatgataaacatccttatacataaaagttttttccttattttacattatttccttagcatatattcccagaagtagaattactgggtcaaggaataggaacatttttaaggcttttgatacatattgccaaattgctttccaaagttattatgccattttacacttctaccattagtgtattatagtgcctatttcataacactatcactgggtatactcatttttaaaatatttactgatttcataggcaataaattgtatctcattgttttaattctcatgttttttatttatttttcaaatggttaatagccatttggtatttctttatgtgtctgtaaattattagttcatttccttggcccatttatctattgtaatttaacatttttcttattgatgtgttttgatttctataccttgggtattaacttgtgtctgacatatttactataaacattagcacacaatttaaacatatgaatcaaaaagttaaagagagttaatgcctatttctattaaaaaacaaagtgctattcctgttataccactccttcccttaaaaagatatacacagtatcaggaaaaaaaagagaaaaagaaaatctctatagcgctaaagtattatatttttgctagaattttgaaaactaagtagtttgtaaagctaaaattttgacaaaagggtggaatgtggtgagtcgtgatggtagagggtacctctgagggcagagcaatagatctgggtagaattcagcttatttctcttcatgacaggtttttggggttgttaaaaaatctcttgtgtcagttgatactgaccatagttaataaactatattagcatgttaatatgaagatgttattcttatttattttcttatgaatacttacaaattttaattttagtaagcttaatatgaaaaaaacaaacataacctgtgatttttacatttggtttgcaaagcactttttacacacgttactccctttcatttgatacagtcctcacaaaactctgtgaattcatttttttcctgcatatcttttagatataggaagcaagacagtagatagcagaagtaaagtatacctaaatatttacatgaattgaattttacattaaactttttgctttcacaaaatcctatgaagcagatgggattatccctagcacattcaccctcctaactccaaaaatatagagtattttgaagtcaacttcattatttactatgtagtccagtttctattattttctttgaaaacttttgatctttctaggcatgctgtggaaaatctgtttcataagattatggacctagagtgggccttaagaagtaatgtggtctaactgccttcctgttattgagcaagaactaaattataccagtgaaataaagaaaatttcattgtctataatattcttaataattttaggaagaagatttaatactctttcctaatatccaatttcagtatctggaaatcctctcctttgtttaatttaaatctgacctgatacatttggttcatttttaaattctgtcctgaatagctgctcagcaattgctttaaaaaaatttttatatgcttccagatcattttgaaattatctttgacttcattctcttttgagtaacttaagtaacaattgacattggtgttggtttatctcagggctacaataaggcagtggattggtgggcattaggagtgctaatctatgaaatggcagctggctatcccccattctttgcagaccaaccaattcagatttatgaaaagattgtttctggaaaggtaagtaaaacattttattattcctctcttattactgtatatgaattttaagcttcatgaattgaaactatattgtgtcataattattattctacattgggaaaaatatagaaaaatctacagttgctgctcttactatcataagaattgaatcatttcagtctcttaagaaaaaaagggcagttttataaagaaattaacaaaacagtaaagcaatttctgtatttagtatttttatcacaaagaacaggatcatagccataattctcgatattccttcaaataaataaaaatagtttattatttcatgtgtctatcttcatggagaaaagttttaggggctgttttatatgcccttccattttcaggagagacttcttgttttaattatgtccaatactataacattggaagtaaaagtaaatataaaatgaataagcctttttcagatggaaatttatagaattgattttaacagaattgttcatatagattgtgattatacttgtcattggtttttagcaaacatggaaataacattaatttttcttcaacatgagtagacttactgtgttgtagtattttacattttgtaaatttcttcataaaccttccttcttttgcacttataacctctaatttgctttcaagagtgttttgtttagggtcagtcatttgctgttgccttagctcagacctcggatctttttttaaaagaccattgtcaattcaatagaaatgagcttgaatttcctaccatgcagcaatgaaagaataggcttttaaacattcccagaaggagaccttctatacattaatgacaaaatatatgggaagggatattttgcttattttcccttctttctatttctacatgtggtactgctttgtcttttcttttctttcccacatagtcccatttagaatatgatcaggaaatagagcatcaatctttatcacattagcctgagatgttatagagttgaggtttttttgttttattttttatttgtttgctttgtattttgtgaccttcttaggcagagataagccggaaggagatagtagagggaaggtctttatttctttgtatctcagccatattcaagctctacatttagtgtgaaagcttacccttggcatctatcaacttacaatttccattgttaactattcacaaggtaccctgaatgtctctaatgtggtaatttattttttttgccaacactcaaatttaaatcatagatgctgcacagctgggctgtagcaacaagacatttgccaatagaattagtctatccaatcacctagaacatacatttcagcacagtattgttccctatctcatagtacatatgcactctacctgggtcatgagattttcccttgtattttgccacgttttatgtagaaagttttatttattatcagtattcacaaattaggagactgactaaagaatttatactccaactatgtcaaaggtaaaaaaataaatacctcttacagataaataaacctagctaggtgttgaatgctgtgcactgataaaggcaatacagaaaagcagaatgcagtacttatttaaacaagtatcagtatcactgctgttcttcttacatttgtagatctctggcttcagacttcttatctttgtaattgttttctcccagcagaacttttgatatgaacaaaacaaaactttgagaaaaattaacagacaaggcagtgatttatttttgaagaatttgagaagtgtagactctcaagaggactaaaggtcatatgaagaatgatgagagaaccaaaatacattaaaatcacaaatggaagaagaatattttactaatacaaaaactaagaatgtaaatgttataataattgtttcaaatcatttaattgacagtaattataaagttcttgaatctttactatattacttttatttatattcatataagaaatccaattttctaacaaggatactgtcataactaaatttacatttattaagaaaaactgctttagttaaaattaatgtgtcttcatttttatgcattggcctcgatttgccaatcattctctattggttaaattttatattcagctgtttatgaatatatattcattttatatcaaactttaaaattttgtatctaataatcagcatatattctaaaatcataacagtctaaatcctgggcaccttagaagaatgacaccagaaaaccttattatatcacaatattctgttttccccttcatttatttagaaatatgacaggatatttggtgtacttttgttttttaactaaaagtaccagattatctctccccatgtgggatataaaattatccccatctcttactccctttactcatctaaagtagaagtcatgaaagtggaatttttgccattaaaaggctctgtattatgtgaagttagattgtattaaccatttcccaataaatcatctgtttcaaaactcaaattcaaactagaatgtgtctctattcacattgcaaaaatattattgtctctctggttagtggctaaaagccaaattggaaactaactagttttttaaattttttaaattgtgcaaattattaaaaatccaatttggtcttatatttgtggatccttatatttatatttgcatttgaacttttaatggttttaatgatatatcatttaagaatatgcttttcattcagaattgtttttgttgattttagaagcatattattttatgaaacagcatcttatattgattatatccaccattctgaagtcacgttataaagattataggtatcaatgacttatcaaagttaaatttattaattaagtgataaattcactaaagtacatatatatgaatattagattgtaaaatactttctctattacaatattttaactcaagctggtatttttaaatgcacacaaagatgatcaatcaacttgttagattctctcctacacatattttgcctttaaaaaaacagaggaggtggtatttaaatgtcacattattcatgcaatgttaaggtttgagtctacaaattcatagttgaaagaaaagatttatgattcctgcattaactatgcctcatcctaacaatacatatgctgagtttctgtatgtagtctttaaatttcatgtctcagtgtcatgtactccatgacaagaatcagttatggtctctatagcacctttgtctggctgcgttacccatggaaatatagaaagtttatattgcagtcaaaaattatacttgcaaataaggtactcaagtaacagctactatggaaaccataactttagagcccttggcttatgtaatttaaaaaaattcttagcttcaacatatctaatgtaaatattgttccactcctaatgagtaacaatatataaggagacatgcaacatagagaagtataaacataagtatatactgaatgatcaaagagttggttaatttttcctgaagggaaattcaatatttacatgaagggtaattgattatcagcccaattgctattcctttctgtctcaggagtccccaagactgtctccaggtttgatgattcaccaggaggactcaacaagattcagcatacagtggtacttgaggctaagatttattacaacaaaagggtacaaagtgaagatagcaaaagtccagaagacaccaggcacaagctttcaagagtcctctcccagggcattcacaagggatgcacataattccttcagcaacaagctgtgacaagcgtgaaattttatctaccagcaacactcattaaatactcaatgcccaaagttttcattgggggttggtcacatatgcaccctctgcctagcacatgccaaaatcccagcctcccagaacaaaagtagttgttcagaataaactatgttgtttgtaccaacagtgtaggcacagtgagccactctaatcctttagggaaagtttcatgttggtataagggcactggtactattcaagttgccagacatctctcaagggccaaacttgtaagcagttctttctaagggtagcagtctcaggcctactatgttaagtcttttctacacacattcggtttcctaaataacatacacatatgcagatattccactatactttttctaagatactattgttaatgcttttggggaaattacaatgtcatttactattttgctatggccatagttaaagagacttagaagtattcagaaatcattttcataaaacacaaaagcagttttactcttttcataaaacccagggccagttttaaacacttcactgtggctatttaaaattcttattaataccttctttctgacagctcttgtggtcctatgagcaaataattgcaaaactggcttcttatgtgagagcagggggagggagaatggggtggatcataatcctctgcaaccttgtagactcattatatctaccactgtttctgcataggtaagggaacagattagagagcccacagatgcagtaccaatatttataaatatttttaatgtcttagctctttcttttcacatatagaatccaggctgattaaagatgcccaggtcttatgaggtagtgtggaactcggcaccatatctataacatgcctagcgtatgaaaagttattatgcctgttgaaaaattgtctaatgtgtatgttcatttttgatcaatcaattctttactgggattgcagatattttgagaacttactgtacctaatttataaataatttgttaaaatttatctcaacatgctcgtagccagtagttagtagattattgcttcttggctgtatataaacccttttgagtcatgtaagcctaataattttatcctgattcataaaagataatgttactagttaaatgatcatttctcctgccaataattgcagaatagcagtaagatttttccctcctttcgaatatcaactttgtaatttctgtgattaagcttagtgtaaacaaatttgatttggctttattttatttcattttcttcttattcatttttattttttacttttttgagatggaatcttgctctgttgaccaggctgaagtgcagtggcacaatcttggcccgctgcagcctctgcctcctgggttcaagtgattctcctgcctcagcctcctgagtagctgggactacaggcatgtgccaccacgcccggctaatttttgtgtttttagtagggacagggtttcaccatgttggccaggctggttttgaaatcctgacctcaagtgatccacctgtcttggcgtctcaaattactgggagtagtaatttgaagtcagtaaactagatagtgagtttaaatcactcagtatggataccatgaacaacatgaatggatttactttttggttgtaacttcatcttgaacttttagaagataatagttatttctaaaactcaaatgtacaagactttataatcagtgctgaaagcagaaaaaatattctgttgagtttgctcaattcagagtgaattttatagttcgtttaacatattacataatgtaatttgacagtagtttaggatatcagccatattgacaatggtgtctttataaaacaaatttatagtaagacattttctccctcactttatcaaacttaggaccttaagaaaagatgaaagtgtttattctataaattaacaggtggagcctgagacaagatgaaaggaggaacttcctatactttcccaatgacttttctagcacagactgtccttggcgcatctgtaaaaataatgatagatatggctgtcttctacgttctttctttaattcaaaaattcagtttcagatcattaaaatagtattctaatgggaaggcttaaaaaataaaaactgtgttgaattaatgtctacagaatactaggcataatacaaggcagtttcatgttaagtcacataatttcttttcatacctgccagatgagatatactctcattgttttataaatgaggaaactgagactcagaaaagttttccctagattgcagagcatgtatgtaagtagagttgggattggaacccaggaattctttctactaaagaaatagcttggtagaattttttaggtggcaaggatgttcacttttatttcatttaactctctagtcctatatgtaggtaaatcaaaactcagaattacccaaagacaaaaggtagtttgtggcaaagcaggaaatagaagaatctagttcagtgattcatttgttattccttcacttggcttcagtgactttgtatcactaatcattccctctcaatctccttggcttgatccccttctcttctttctatgcacttcctcaatgggtggtttcatccagtctcatgactcaggacaattcccaaactcatttttccagtccatacctgattcccaaattccatactcttgtatctagtttctaacttgaaatcttcacttggatatctgatacctcaaattcaacctgtctaaaactgacaagtttttgtcctctttcctacactccacccacccccctccacgaagccttccccatctaaactgatggcaactccaccctttcagttggtcaggccaagacaccttcgagtcctcacttcatatctaatgcacagggaaaccatttttgctttgtctttagaatttacagaattcagccacttcttaccacatccactgctgtcactcttaagtgagtcactagagtggttccttaaaaatgttaaataatatcctattattcttttcaaaaccttgcaaggattccccgttttcttcagagtaaaagtcgaagaccttactatgcaaagtttcatgaaaaagataggataacattgttaaaggatcactcggttgctaagttttaattgtcttcctcactagaatgtaaactccatgaaggcagaaatcttcatcttattttgtttacttatataatccaagcacaaattcctgagatatattagtaagcacatagtacttgcttaattcaagcataacacatagtagaggttcaatcaatatttgttgaatttcaattcatgcattcattaaatatttatgaagctcctagtatgtgccagaccagttctacatgctggatacagcaagtcagttgtggtctctgccttcatgaagctttcatgaagtgtactctatctttggtatctctccagagacatactgactcaagaggccttctgtggattcaaaactttttttaagtatcacaagtgattctgataaacaccatgtgttgagagcttgttttgtgtatctgtacctcactggggaattagatttattctcaagaaaatataattagaaaaatcagaagtaatatggtctctaatggttggaaaacaatcctaaacaataaataatattgaagaaaaaatattaaagaaaacacgttgggaagtgtatatatcacaaacacctcttttatgttgtacaaacacctcttccatgttaaatgatgccagtttcccataaccttatctctcagacctaatggcttaatgattttagactttctcttttcaatatctgactctttacatttactttcacattatttgcctatcttggactggcagaaagctcataggtatatgtcaggaagattaggttattttcccaataattctactaacggagttggtagcctcacaggagctcagattccttatctttaaaatgagagtttagactcaattaaactaagctccctctagctccaatattagaagattctcatttcactttctatagtagttataattgataatgataaaagtaatacccttttgatatagttttaaaggaaaaattagatagtcgctcttcccatcatagaaatctttagtgtctccaggttgatgtattacaaataaaggttgtacacttaaaacaattttgttgaagttattttctgtttttcactaattccagtttgataaatcaacatgactctttgaaaagttcagtcaacaaggaaattacatttcaggttaaatttcagaataatcatgggaaaaaatactttcacaatgactttcattatttctcccccaaaatactttaaatatgtgatggattcccattattaacatgaaccactatgagagtgtgggctacctatgagaatctctggggaagagggtgtgatatggaggtgaggaggatatgtctatgatttgaaaaggttcccaaatcgttctgatatctgctgtcacaacccaccaccactccactgtcacacacacacacacacacacacacacacacacgttcaagaccatcactttatttgcattccaaaataaagaattacattatttagatgattttatttttcatgcattccactgcatattacctgaattccaaagataatttatatgtagtacattactgtctgccatctgaatgtaatgaaagagataactggtacattaccatggaacagttcacacaaatttaatcttaaatatagatgtacttcaaataaattatttctttggaatctaaataaagtttagatttatcactggaaaaatctgagctaatatacccactggaaaaatgtcatgttatttttaaagtagacagtgtgccttttgaaaaccccttattctctagttattacttcatctaggtaaatgaggaaatgtgcagcaaaatatttttaagaaaatttcagtcttttagaaggttcctgataatgactatttttaggttattgaatcatggaaggagaatagataattaaaaataagtaccctgaagtcagtgtacccagtttggaattacacctttactatttattagctctgtaatcttaggcaaaataatttctgtaggtctcaattgcttcacccctacctatgaaatttggataataatcatacctatgttttggattttatgagccagtacagaaagtgtttagcataatgcctagcttctagtaaaccactgtgtcaagaataaaactagagaaggtagaagttcacatatcttattattttagaacataaaactgctcataatctaggataataaagggccttgcaaaaatgagattttgagttgctaatttatatgagttgagcctaaatcctggtcatttattaactattaaccctttaaatagtctttagttgttgatagaatattagttttcctctggtatgataatgatttcaatttacagtactgtattatttacatttaaaatgttatgatcttttactagcatagaaaataaaacctctgcataaagtagtgaacagagttgagaatagtgcttttcaagcttttatgtacatatgaatcccttggagataaaagctcagattttcaggcccaatgcccccatcatctgaggcaagccacaggaatctacatttttatccttttgtctcccagtttattctgatgtgcatgggtcctaggaccagattttgaaaaaatttacttatagactagcacaaaagtggcagtcaaaagctatggttatgaatttaactttactataaaacctatctttgcatgcatgatttaacttctactttgagaacatgagaatgtatgtcaagtaggttgagcttttagaaagtcagaatataaattaaggagtctatatatttgaagacagtgtaataaagagcaaaattcatgaagctacaaatcatgactagattactggtcccaactctgccactttatggcctgatgactggggaagctatacccagtaacattgctgaatcttagtttctccatctttaaattggagttaataccatattcactgaatttgtcctatccaactagaatgtaagttccatgaaatcagagacttgccaggttttgctcactgctatatatccagcacctaaaatagtgcctggcatatagtaggtattcaataaataattgtaaaatggatgaactacagtatttgaaatagtctaataaatactgagaataaaaatggcacaataccttccctcagaagctcagagcctgggggagacagaaatatgcacaaatactatagcatagttgaataaataaatgtattataaagagcaactgaggtaatgtaatgatgcactatgtaagttatgaagtgatggtagtacttgtagtggtagcacttgtagagaaacaaaataagaatgcagagagtttggggatgcgcctcttaaccctttaaagtgttttctacaaagtgctatgatcaatttgtagttgaggctgtaataatccagatatgtatacacatacatgtgtgcatacatatgtatgtatgacagggaagagggtaatgaaagggattgaacacaagctggaaaggatagtggagaggtggtagtgatgacaaaaaagaataaggaggcatagatgcagctattccttcatcctttggtggtacccattttaattttttaggtacccatatcaatgaaacagtaataaccagaagttagattggtatagaggagaagaatgtgtttaaacaaaacaaaatgaaaaatagacttaggtctcctataaatgttactttaaccttatcgattgccaaaaatcttcacttatttgggggttttccatttatttttaaggccagaggccagtctagtaattgtaaagtcttcacaatttagtaggtagaaaaatgcttttaaaccaatctaaatcatttttatactgttgcataataggagaattatttttaaaagccaacttctgataaatgaaaaatgttttcctatactgtgaaaggcagtgtgggtttttacaaccatttttagacttcctttttgatagatctcttttcaaaatgtacatactgatttccttcatatgctggttcttctatttatattacaaagttaaatttatgtatctttgagacacaggtttgtaatgtatgatccaaagagattgctcttaaagataggtgaactttctgatattttgcaaaagttctgtaggtgtgcacatttttctggagactgctccatgttcttaaagacatcataaccaaagcaaggccctaagagaacaggtttagttcattcacccaagtaattctcttctttatggctactgtggggactgtaacatgtagttaaaagtatgtgaaggtcatcgctccatatttttgtttatataatggcttgttgccttgaaaaaaaaactttatgaaatcaaaacagaaatatcatgagtcttagaatgtgtgttttaccaaatggtgtgtttgtgtaggtccgattcccatcccacttcagttcagatctcaaggaccttctacggaacctgctgcaggtggatttgaccaagagatttggaaatctaaagaatggtgtcagtgatataaaaactcacaagtggtttgccacgacagattggattgctatttaccagaggaaggtgagactttcttttttaatttaaaagcttttttaaagttggtgtttaaattatatgtggtggagatattttcaacttaacacatagttttaatttttttaccttttgaattaatcttgtgcaggatctaaagtactttacagcccataacttaaaaatgagtttccccctagaattttttttttttttttttgaggtggagtctcactctgtagtccacgctggagtgcagtggcacaatctctgctcactgcaacctccgccacctcagttcaagtgattctcctgcttcagcctctcgagtagctgggactatgggtgcatgccatcacatctggatgatttttttgtatttttagtagagacagggtttcactatgttggctaggctggtcttgaactcctgacctcaagtgatctgcccacctcggcctcccaaagagctgggattacaggcatgagtcatcacacctggccttacctagcttaaaaagaaagcatatatgctattttgaccatcaacctgaaatgtttcctttgttaaatttttcctatctatgcttgttacgcttcacaaaactgtggaaattatatattagacaatgtcctaagggttttcaaaactgatgtgaagccacattaggaagatatataaataaatgtagttgcccatccagaattggcatgtgccagatatataataacattaaattgctagtttcattccttgttagtcttcattttcaccttcttgtggcatattggtctctctttagagatacagctttcctttatccatttgaaagctaatttgaacataattcatacaaattaggggttttaattcatgcatttttggaaggtcaaagcaaattatctgaagttactacttttttccttttaacaattatttattcacgtaagattttttccaaatagttatcaggtccctgcttgtatgttaggtattctgcaaggtgctgagaatacaatgatgagcaaaaccaacctttattcctgcccatatgaagcttatacttccaggggacagggagattagtcagatggtcgtataaataaatgtaaaagtactatactgtgagaaatgtggaaattcagaataactttgcacctgagtttttgagatttgttttgtttggtcttttgtttgactctttgctcgctaaagggattcttagagttagaaattcaggcaacttgaagacttgaatataagtatagatcaagttaatcgctggcattattataccaccataataaaatagagaagaaaccccagctaaactgtagcatatttaaaagaaactagtattttgttttgttttgttttttgctacacaagttgccagtatgacagttgtggtaacagtactatattaattgatagcagttatcatttcacttttgtaataatttgagacatttaagaaaagattttgctgcactgaattacctttatctctcattttgcttcttacatgcttaaagatgatttgcatgaataaagtgttttcattttgaatatatttaatttttttcttcttttttttcataaaaccaaaacttctaatgttttagagacatgtcatctttaataatgctgtgcaactacatgattgagtttccttaaggaaaaaaaaatttaatgctctaattaagtattaaaagcacagtttttctaatttatatattttacaaatgattacagtaacaagctgggtgccctggctcacacctgaaatcctaacactttgggaggccaaggtgggtggattgcttgagtctcactcaagagtttgagaccagcctggcaaacatggcaaaaccccgtctctacaaaaaatacaaaaattatctgggtatgatggctcatccctgtaatccgagctacttgggagactgaggcaggaagatcacttgagcctgggagattggggctacggtgagctgtgattatgccactgcactccagcctgggtgacagaacaagaccccgtctcaaagaaataaataaataaataaagattacaaaaacaaaacaattaaagaattttaaaatgcagcaaaaagaacatatagccagaccaaaacaatgtgaatgcaatacagcctatctcacaagagggatccagaaactctctgttaagttcatgaatcatggctgtcagcattattatcgcaaatagatatgttatatagtcaataacaagattgatagcactttaaaatagatttagatctcataaaaaactttattttttatattttttctaaatttgctaacaccaatgcaatactgtataattaataaaagcaactccctataacttctcttttcagtcttcaaaataatcctgtgaaataagtgataccattttccccattttactgatgtggaaatcagctcagagaggttaattaatttaaacataatcatgcagctgctaaataatacctatatttgatcccaggttcttcagattctcaattccaggtcacattatccctttaaagtccttttgacatgattcttaaaatgaaactccaaaccactaaacaataaattgtttcacaagattttcatgaattttacgtgtatcatcttcttaacttttatgctttgagcattttgggagtaggaagactctgtctcaaaaggcagcaaaaaaagagaatgaactgtggtgttaggtagacattgatctgaatccctgatcaaccaatcattagcagtatgatcatgaacaaacgatttaacctctctaaagcatcagttttatcacccttaaaatttgaatttggatagagaatacaaaaggaagagcagtttggtgagaaagattagatggattggcccaggctccattttcctttctggttgagatatgtttcatatacttataaccaggtaatttattaagcaaatgaatttgaaattatcataattccaccatccaaatagaacctagtatttgatatatgtctttttactttttttttccctgtgcccttcatcactgcagttcagtcctatgatctcagtagccaattaaaatctacctcctccaaccctgcactttaccatttccttcagtctcttatctcacagttgctacatactacataattacatctgagtgacttactgccatattatacaattgttttaaaacaggccaggtgcagtggctcacacctgtaatcccatcaatttaggagtccacagtgggaagatcacttgagccaagagttcaagactagatgggcaacatagtgagacatcatctcttcagaaaataaaaaagaattagccaggtgtggtaacacacacttggtcccagctaccctggaggctgaggcaggaggatcacttaagcccaagaggtcaaggctgcagtgagccatgatcatgccactgcactccagcctgggctacagagctgagaccctgtctctgaaagaagaaaaaaaccctactccacaataagtgtatctatcgaacttctattttcttttagtgctttctgaactctaacttattttttgttgttgtaattaaccagttgtcccctccatatttattgaataattcttatttggcctcttatttgaaattctacctttactaatattaaattaatatatacatctgtctatttctgaactttttaaatttttattgctgcatactatttttatatattcatgaagtacatgttatattttaatatatgcgtagtatgtgtagtgatcaaagctgggtatttagcatatccactaccttgatcgtttattgtttctttgtgttgggaacatttcaaattttctgttccagttactttgaaatatataatatattgttgtgaaatatacaatataaccagcctgctgtgctatgaaatgctagaacttattccttctgtctaactgtatgtttgttctcagtaccttagttctcttcatcccttcccccacacacacacatccttctcagcctctggtagctgtcattctatacgttacctctaagagatcaacttttttaggttccacatgtaagtaagaacatgtgatattgtctttctgtgcctggctgatttcactttacagaatgatctgtttctatccatgttgctacaaatgacaagatttcattcttttttttacagccaaatagtattcctatatatattacattttctgtacccattcatgtgttgaaggacacttaggttgattccatatctttgctattatgcatagtgctgcaataaacatgaggattcaggtattgcattgatatactgatttcctttggattaatggaattgctaaattgtatgatagttctatttttagatttttgaaaaatctctgtactattttccatagtagctgtactaacttacatttttaccaacagtgtataagaattcccttttctccacatcccctccagcacttggtgttttttgcctttttgataatagccattccacctgggtacgatgatatctcactgtggttttgatttgcatttccctgatgattaatggtgttgagcattttttcatgtacctgttggccattgtaaatctggttttgagaaatgtgtacacatatcctttacccattttaattagattgtttatttttggctactgaattattggagttccttgtatattctgcatattagtcccttcttggatgaatagtttgcaaatatttttttctcccattcaacaggttgtctctttactcttttgaatgtctcctttgctctgcaaaagcttttaatttaatatagcccaatgtgcctatttttgtttttgttgcttgtacttttcaggacttagccataaaatcttttttgtttgtttattaggttttttttttttttgagttggagtttcgctcttgttgcccaggctagagtgcaacggtacaatctcggctcgctgcaccctccacctcccaggttcaagtgattcttctgcctcagcctcctgagtagctgggattacaggtgcccacaaccacacccagctaatttttgtatttttagtaaagacagagtttcaccatgttggtcaggctggtctcgaactcctgacctgcctcagcctcccaaagtgctgggattacaggcgtgagccaccatgccccacccataaaatctttgactagaccaatgttctagagcatttcccgtatgttttcttctagtattgttatggtttggggccttatttttaagtacttaattcattttgagtgatttggggatatggtgagagagagggatctagtttcagtcttctgcatatggatatccagtttttccgcaccatgtattgaagagagtgtcctttccccactgtatgttcttgatgcctttgtcaaaaatcacttaggtgtaatatgtggatttatttatgggttctctattctgttccatgggtctctgtgtctgtttttataccactaccatgctgttttagttactatagctttatagtatattttgaagtcaggtagtgtgatgcctccagcattgctctttttgctctggattcctttggctattcaggctcttttgtggttccatacaaattttaggatttttttttctatttctgtgaagactatcattggtattttgataggaattgcattgaatctgtaaatttatttgcatagttgatcattttaatatatttatttttctgattcatgaccatgaccatgggatgtctttccatttgtttctgtcctttttaatttctttcatcagtgttttgtagtttttcttgtagaggtctttcaccttcttggtcaaatttattcctaggtattttatttatttttttgtagctattataaatggaattatattactgatttctttcttagcttgatcattattggtgtatcgaaatgtcactgattttttatgttcattttgtattctgcacctttacttatttttttatgagttctaagaatattctggtggagtctatatgtaagattatgtcatctgaaaggaggggcattgtatttagatgccttgcatttagatgccttgtatttctttctcttccctgattaatctggctaggacttccattactatgttgaataggagtggtgaaagtggacatccttgtcttggtccaattcttagaggaaaggctttcaacttttcctcattcagtatgttagctgtgagtttgtcatatatgacctttattatgttgagtaatgcctcttctatgcctaatttgttgagagtttttgtcaggaggggatgttggcttttatctaatgcttttttctgcatctattgagatgatcatatgatttttgttgttcattctactaaagtgatgtatcgtgttaattgatttgcatatattgacccatccttgcatccctgggataaatcccacttgatcatgttgtattatatatttgttgtgttgttggatttttgttagctagtgttttgttaaaaatttttgtgtctgtatttctcagagatgttggtctgtagtgttctttttttgttgtgtgcttgtctggttttgtatcagagtactgctggcctcgtagaataagttaggaagaattctctcttctttaattttttggaatagtttgagatgaattgatgctagttcttctttataaggttgatagaattgagcagtaaagccatgcagccctgggcttttctttaatgtttgatgggaatctttttattacatattcaatctgttccccattattggtctgttcagattttctgtttctatctggttcagtctttgtaggttgtatgtgtccaagaatttatctatttcctctaggttttccagttagttagcatatagttgttcatgatagtctccagtgatctcctgtatttctgtggtgtcagttgtaaaatatttttcttttctgattttgttaacttggatcttctctctttttttcttggttagtctagctagcagtttatcaattttggttatttttttaaaaaaaaaacctttcatttttatgatcctttgtatgttttttctctatttcatttagttgtgctctgatttttattatttctttccttctactaattttgtttggtttgttcttgcttttctagttccttgaggtacgttattaggttatttgaaatctttatactttttggtgtttattgctataaacctccccttagcactgcttttcttatattccataggttttggtatattgtgttttcatttttctttgctttaagattgtttttatttctttcttaatttcttcattagcccaatagtcattcgggagcatattgtttcatttccatctatttgtacagtttccaaagtgcttcttgttactgatttctagtttttcccatcaggatctgagaaaatcttgatatgatttcaagtttttaaaatttgttgagacttgttttgtggcctaatataaatggtctatcctggagaatgttccatgtgcttattagaagaatgtgtattctgcaactattggataaaatgttgtgtaaatgtctcctaggtacattttgtctacagtgcagtttatgtccaatttttttggttgattctctctctcaataatctgtacaatgctgagaatggagtgttgaagtcctgaactattattgtattggagtctgtctctctctttagatctaataatatttgctttctatatctgtgtgctctagtattggatgcatatatatccgttatatccttttgctgaattcatccctttatcattatattatgaccttctttgtctcattttactgttttgacttaaagtttcctttatctgatataaatttagatactcctgcttgtttttgttttccatttgtatgaaatctttttctgtctcttcactttcagtctatctgtgtgtttacaggtgaagtgaggttttttgtaagcagcatatagttagatcatgttatgtttatatattcagacagtccatatcttttaagtagatatctgatttatttacatttaaagttattattgataggtgaggacttattcctatcatttaaaaattgttttctggttgctttgtatatccttcattcctttctttctctctaattgtttatcattatagtttggtggttttctgtaatggtaatatttgagtcctttctctttctcatttatgtgtctgccctaccagtgacttttatactttcttgttttcatgatggtaaatatcattgtttcacttccagatgtaggactaccttaagcatttcctgtagggctgctgtaatagtggtaattccctcagtttttgcttatctgggaaagactttttttctccttcatttttgaagaaaggtttcttggttagtctagtagtttatcgttggtggcagggtttgtttttttccttttagcactgtgaatatatcatccaattctctcctggcctgcagggtctcccctgagaaatccacgttagtctgatggaggttcccttatatgtgacttgatgcttttctcttgctgtttttagatgtctgtcttgtctttgacttttgacagtttcagtaaagtgtgtcttggaaaagacctttttggattgtatctatttgatgtttgagcttcctgtatctggatttctaaatctcttaaaagaactaggaagttttcaactattattaaattaaatgagtttttctatgtcattacccatcactttaccttctggaaaaccccaaatttgaatatttcgttgctttaaggtgtcccctatgtcatgtatgctttgttcattaatttttattttttattcttttttggtgggtctgtctgaattatttcagaagacctgtcctcaattcttctccctgatatagtctattgacaaagctctcagttgtatttttcatttcattcattgaattcttcagttctgggatggatctgtttggttgtttttttttgtttttttgttttttttgaaatggtgtctcgctctgtcgcccaggcaagagtgcagtggcgtgatctcaactcactgcaagctccacctcctgggttcacgccattctcctgcctcagcctcctgagtagctgggacgacaggcacccgccaccatgccccggctaattttttgtatttttagtagagacagggtttcaccatgttagccaggatggtctcgatctcctgacctcatgatccacccaccttggcctcccaaagtgctgggattacaagcgtgagccaccatgcccggcctgtttggttcttttttatgctatctctctgttgaatttctcactcatatcctgaattgttttcctgatgtctttgtattgtttgtctgtgttctcttatatctcactgagcttctttaatatcattagtttgaattctttttcagacatttcatcattttttgtttaattggaatctgttggtggagaattatgttcttttggaggtgtcatgtttctttgctttttcatgtttcttgtatacttacattgacatctccacatctggtgtaacagtcatttcctccagtttttaggattggcttttgtagggtaagacttttttctgtggatgtattatcatgttggtttgttgggcagtttagcttttattctgggtgcatgcagtagtgtagtctctatgatttcttcagctgtaattagcctcagtgggtgtctgcgatttcctcagtggcttaggccgcattattggtgtagcctgtggtgaggctttgctggggacagggacaccaggcatcctgatcctcaggccccagtggtggtagcagcaggccaagcatacctgcccctggtggccatacactggcatcaattttagcaggtctgcaagggccaattcttaggcctctatgtggcttgctcaggtaccagcagtggcagtggtaggctgagcatatggatgagaccttagtctcctgtgcagcatgtgtggcataagcgattgtaatagtgatggcaggccaaccctcaggctcccaggcagtacacactgctgctagtgatggtagcaacagattgggcaagccagaccctaaaccctcaggtggcatatgtgggtaagcgccagcagtggtagtggtggcagactgggcaggcccagcctcaggccagtagtgggtggggcagggcaatccccaggccctcagatggcatgcttgagcattggggttgcagtgccaggcagtgcaggcatttactcaggcccctcaatggtgcacgtgggcacaggctgtgttggaccaagtgaggcaatccccagaccctcaaacaatgtgtttgagtgcaggcagtcagtggtttgggtctgttgttagaccccctgatggtgcagtgcatgccagaagcagcaagcagggtggatggatccccaagcctccagacagtgcactcaatcactgtgggaggtgccaccaggcagggaaggcctgtccccaggctcctctgttgtacctgtgggtgcaggctgtggtgaacagggcagtctttgggccactggacagcatattttgatgccagtggctgatagcctgagtctttcgtcatgcttcttgatcatatgtatgtgtacccagagtgatagacagaggggggcactccccaggcctcccaggtggtgtgctagggcactaggaggggtggcacttaaagggacaggcctgtcctcaggcccctattggtgcacacagatacagactctggtaggcagggaaggactattcctaggcccctggataaaatacttgagaggtggtaggcagagtgagtctgtcctcatgcccccaaatagcatccagttgggccagttcccaggtccactgaaggtgctgcaagtacctggcagtcctgttgtgggggctgggcattgctatcagtggcagtggccccaggcaggaggccctcagactctggggagtgtatgctttggcttccggccccagaaacagccttccctagtgtgctgccctgcttgttctttggagtataagacactgtgtgggctcgagtgctggggacccagccgcaccattgggtccagccagcactgtaccactggaacccctttgatagacatggggcactgtcagttgggctccaggtgtatagagatgcatactctctaatggtagttggcttctcaaaatggcactgtgcttcagcttcttgggtcctgggggtgggtgtgggacctggaacaaactccctctctggaacaatgctattgtgtgaactccaggcaggtccctatacttgtctcagaattcacgagggttgtggggatcttacatggctaggattgcaagagtctgtggtggaaatgtggaccactggggatctctcagttaccctttccccatactggagaacctcttgtggctgccagctggtcccagctaggccagctgcttcacttccttttgcttatctgcctcagatgttccctgtcacttccctgctaaatttcagtgttctctcttagaggctttattcaacatgtgattatctactcactgttttggtccttctttgtggaggagagttctgagtcagccatcttgaagccctgacctttattttttaggagttctttttgtctgttcttgtactgtatatgtcactgctttatgtagctttaaaatattttaatattagatgggtccagtttcttcacccttgtttaccctttccaaatgttctgttctcttgccccatatgcattattttagagtcaagttaggtaatttatatttcctagaaaatcatccttatctcctgtatgttttctcttccttttttgattagacttgccaatggtttgtgggttttttgtttttttttttggtctctctaaagatttattgaatttggggattaacagtaaagttgcatattaggagagaacctgaatcttgagaatttaccattatgaacatgttgcttctgcatttactcaaatatctttcgtcattcagtaaagttttagagaaccccccttcctccatataggaaggaatttatgtcttaaaattattgcttaaatttatattttggttgctattattaatgtgtttgctttcccgttatagtaggatatgggcaaaacatcatttttatgtttatattataattgaccatgttactaaattctgttattgatttccacatttttcagtgattcctttggatttttattgacaatcataggagattggcatatcattttgtctgttccttttcagtatttacatctcatttccatttttgttttagtacatatattagaatgtctaaaacaatattttaatgcagtagggcccttgagctttcttgtcttgttcctgctttgaatggaagtgcccaagaatatactttcagggatcatttctataatttgttgcctttcatgttttaccaccaaatataaagttggccatttggctgagataggtattctttatgaggttaacaaaacattgttgatttctaatacactgtattttatcttttttgacatgttagtgtgatgaattatatgagggagacatcctcactttcctggaatgaataccattaatcatggggtattaacattttaatatttgcctgaaatctatttgccaaaattttatttagggtttttacttctgtagtcataagttttattagtctacagtttctgtttttttgaagttgggattatatgggattcataaaatgagtttagaaagtttccaggcttttattctgcagaaaatttaggaacatagagtcatcttatatctattccttataaattttaacagactaattcttgggtattggtctcttcaagtttttactttttgactcaatttaagaaatttatatttccaataaaatcatccatttccctttctaattatcattgcttatattatctttattgttgtatttattgttaattaatgctatttcgaggtatattctttagattgccttgaggcttgtcaactttattagtatgctaaagatttatggtgtatttgaatcttttcatatttatatttagaaataaaatcttctgccaaatagcagtcatttacttatctattcctattatgtgtttaatttttaataattattcctaaaaggggatagaacaggaaggccactactcatttaaagtgtatgtgcttttcagagggcttgacttatcccaggtagtaaacaggtaacctaccaacaagtggcacactgtaacatacagattgtagtaatggacaaattgattgacagccaaatcttgaattatcaatgaaacagatgtaaggatccatggacaatttacaaataaaaatagcagagtactttaaccatttgttttaatatcttctcaagtattataactatgcacagcagtgcaaaaatcatagtaaatatgaatagttttaattgtcttctttattctctgatgcatctccaaatgatcaaggaaaaaaaaaggcagaagaaagaagtagcctgaacaactcaaactgtacaatcattttctacacatgattgccccaataggtttgttattctaaattgctggctggctagacgtgaagcaactgtctgcttagctcattcttctgggtagtgcaaaacagcagtccccaaagcagggcgtgcaaggcaaccagctctcaaacaaaaagataatattagaagtcccattcctacttatttttaccttattctttttcaataccttatttgtgtgtgtatcttataatagtatagtcatacatctaaataaattgtaagtaaataactatatatatgttgattatgtgtactagaaaatgttttaatgaaagggatataaattaaaaacccttggagagctctgggccagaagtggagaatcatgaatatgaaacctgctttagccgcttatcagtcatgtgaatttggtcaatcgactcttttataatctgtaaaatgggagtaagaacaccagtccttccttcctcacagtgttgtactgagaacagaataaagcaactgtaattgtttgtaaattctataaaggctgtgcagattatgattttttttttttagcttttaaaatcttttcctcaaatgtattcagtacccacatttaatctttatagaagaccatattcgaagtagtgggaagacattttacttttaggatcaaaggagaaaaatgtttaaggtttaacaattctctaattctaaaagagttatatttctttccaaactctcagaaagttttgatggccagatattttaaacaaaataaacttgggaattaaaaaaggaaagcaattaaaagtaagtctgagatttagctgtaacttgaggagaaaagaatttttacaagagggataggaaaagataaggtcttaaaaacaaggaactaaaaattaagactgaagttttgtaaccttaggagccaggattttgatgccaacagttaattatcccagaaatttctttttttttttattattatactttacgttttagggtacatgtgcacaatgtgcaggttagttacatatgtatacatgtgccatgctggtgcgctgcacccactaactcgtcatctagcattaggtatatctcccaatgctatccctcccccctccccccaccccgtaacagtccccagagtatgatgttccccttcctgtgtccatgtgttctcattgttcagttcccacctatgagtgagaatatgcagtgtttggttttttgttcttgcgatagtttactgagaatgatgatttccaatttcatccatgtccctacgaaggacatgaactcatcattttttatggctgcatagtattccatggtgtatatgtgccacattttcttaattcagtctatctttgttggacatttgggttggttccaagtctttgctattgtgaataatgccgcaataaacatacgtgtgcatgtgtctttatagcagcatgatttatagtcctttgggtatatacccagtaatgggatggctgggtcaaatggtatttctagttctagatccctgaggaatcgccacactgacttccacaatggttgaactagtttacagtcccaccaacagtgtaaaagtgttcctatttctccacatcctctccagcacctgttatttcctgactttttaatgtttgccattctaactggtgtgagatgatatctcattgtggttttgatttgcatttctctgatggccagtgatggtgagcattttttcatgtgttttttggctgcataaatgtcttcttttgagaagtgtctgttcatgtcctttgcccactttttgatggggttgtttatttttttcttgtaaatttgtttgagttcattgtagattctggatattagccctttgtcagatgagtaggttgcaagaattttctcccattttgtaggttgcctgttcactctgatggtagtttcttttgatgtgcagaagctctttagtttaattagatcccatttgtcaattttggcttttgttgccattgcttttggtgttttagacatgaagtccttgcccatgcctatgtcctgaatggtaatgcctaggttttcttctagggtttttatggttttaggtctaacgtttaagtctttaacccatcttgaattgatttttgtataaggtgtaaggaagggatccagtttcagctttccacatatggctagccagttttcccagcaccatttattaaatagggaatcctttccccattgcttgtttttctcaggtttgtcaaagatcagatagttgtagatatgtggcattatttctgagggctctgttctgttccattgatctatatctctgttttggtaccagtaacatgctgtgttggttactgtagccatgtagtatagtttgaagtcaggtagtgagatgcctccagctttgttcttttggcttaggattgatttggcgatgcgggctcttttttggttccatatgaactttaaagtagtttttccaattctgtgaagaaagtcattggtagcttgatggggatggcattgaatctataaattaccttgggcagtatggccattttcatgatactgattcttcctacccatgagcatggaatgttcttccatttgtttgtatcttcttttatttccttgagcagtggtttgtagttctccttgaagaggtccttcacatcccttgtaagttggattcctaggtattttattctctttgaagcaattgtgaatgggagttcactcatgatttggctctctgtttgtctgttgttggtgtataagaatgcctgtgatttttgtacattgattttgtatcctgagactttgctgaagttgcttatcagcttaaggagattttgggctgagacaatggggttttctagatatacaatcatgtctgcaaacagggacaatttgacttcctcttttcctaattgaataccctttatttccttctcctgcctaattgccctggccagaacttccaacactatgttgaataggagtggtgagagagggcatccctgtcttgtgccagttttcaaagggaatgcttccagtttttgcccattcagtatgatattggctgtgggtttgtcatagatagctcttattattttgaaatacgtcccatcaatacctaatttattgagagtttttagcgtgttgaattttgtcaaaggccttttctgcatctattgagataatcatgtggttttttctttggttctgtttatatgctggattacatttattgatttccatatattgaaccagccttgcatcccagggatgaagcccacttgatcatggtggataagcttttggatgtgctgctggatttggtttgccagtattttattgaggatttttgcatcaatgttcatcaaggatattggactaaaattctcttttttggttgtgtctctgcctggctttggtatcaggatgatgctggcctcataaaatgagttagggaggattccctctttttctattgattggaatagtttcagaaggaatggtaccaattcatccttgtacctctggtagaattcggctgtgaatccatctggtcctggactctttttggttggtaagctattgattattgccacaatttcagatcctgttattggtctattcagagattcaacttcttcctggtttagtcttcagagagtgtatgtgtcgaggaatttatccatttcttctagattttctagtttatttgcgtagaggtgtttgtagtattctctgatggtagtttgtatttctgtgggattggtggtgatatcccctttatcattttttattgcgtctatttgattcttctctcttttttctttattagtcttgctagcagtctatcaattttgttgatcctttcaaaaaaccagctcctggattcattaattttttgaagggttttttgtgtctctatttccttcagttctgctctgattttagttatttcttgccttctgctagcttttgaatgtgtttgctcttgcttttctagttcttttaattgtgatgttagggtgtcaattttggatctttcctgctttctcttgtgggcatttagtgccataaatttccctccacacactgctttgaatgtgtcccagagattctggtatgttgtgtgtttgctctcgttggtttcaaagaacatctttatttctgccttcatttcgttatgtacccagtagtcattcaggagcaggttgttcagtttccatgtagttgagcggttttgagtgagattcttaatcctgagttctagtttgattgcactgtggtctgagagatagtttgttataatttctgttcttttacatttgctgaggagagctttacttccaactctgtggtcaatattggaataggtgtggtgtggtgctgaaaaaaatgtatattctgttgatttggggtagagagttctgtagatgtctattaggtccacttggtgcagagctgagttcaattccttgttgactttctgtctcattgatctgtctaatgttgacagtggggtgttaaagtctcccattattaatgtgtgggagtctaagtctttttgtaggtcactcaggacttgctttatgaatctgggtgctcctgtattgggtgcatatatatttaggatagttagctcttcttgttgaattgatccctttaccattatgtaatggccttttttgactcttttgatctttgttggtttaaagtctgttttatcagagactaggattgcaacccctgcctttttttgttttccatttgcttggtagatcttcctccatccttttattttgagcctatgtgtgtctctgcatgtgagatgggtttcctgaatacagcatactgatgggtcttgactctttatccaatttgccaagtctgtgtcttttaattggagaatttagtccatttacatttaaagttaatattgttatgtgtgaatttgatcctgtcattatgatgttagcttgttattttgctcgttagttgatgcagtttcttcatagtctcgatggtctttacattttggcatgattttgcagcaactggtaccggttgttcctttccatgtttagcacttccttcaggagctcttttagggcaggcctggtggtgacaaagtctctcaacatttgcttgtctgtaaagtattttatttctccttcacttatgaagcttagtttggctggatatgagattctgggttgaaaattctcttctttaagaatgttgaatattggcacccactctcttctggcttgtagagtttctgccgagagatccgctgttagtctgatgggcttccctttgagggtaacctgacctttctctctggctgcccttaacattttttccttcatttcaactttggtgaatctgacaattatgtgtcttggagttgctcttctcgaggagtatctttgtggcgttctctgtatttcctgaatctgaatgttggcctgccttgctagattggggaagttctcctggataatatcctgcagagtgttttccaacttggttccattctccccatcactttcaggtacaccaatcagacgtagatttggtcttttcacatagtcccatatttcttggaggctttgctcgtttctttttattcttttttctctaaacttcccttctcgcttcatttcattcatttcatcttccattgctgataccctttcttccagttgatcgcatcggctcctgaggcttctgcattcttcacgtagttctcgagccttggttttcagctccatcagctcctttaagcacttctctgtattggttattctagttatacattcttctaaatttttttcaaagttttcaacttctttgcctttggtttgaatgtcctcccgtagctcagagtaatttgatcgtctgaagccttcttctctcagctcgtcaaagtcattctccgtccagctttgttccgttgctggtgaggaactgcgttcctttggaggaggagaggcgctctgctttttagagtttccagtttttctgctctgttttttccccatctttgtggttttatctacttttggtctttgatgatggtgatgtacagatgggtttttggtgtggatgtcctttctgtttgttagttttccttctaacagacaggaccctcagctgcaggtctgttggagtacctggccctatgaggtgtcagtgttcccctgctggggggtgcctcccagttaggctgctcaggggtcaggggtcagggacccacttgaggaagcagtctgcccgttctcagatctccagctgtgtgctgggagaaccactgctctcttcaaagctgtcagacagggacatttaagtctgcagaggttactgctgtctttttgtttgtctgtgccctgcccccagaggtggagcttacagaggcaggcaggcctccttgagctgtggtgggctccacccagttcgagcttcccagctgctttgtttacctaagcaagcctgggcaatggcgggcgcccctcccccagcctcactgccaccttgcagtttgatctcagactgctgtgctagcaatcagcgagactccgtgggcgtaggtccctccaagccaggtgcaggatataatctcctggtgcgccgttttttaagcccgtgggaaaagcgcagtattcgggtgggagtgacctgattttccaggtgccgtctgtcacccctttctttgactaggaaagggaactccctgaccccttgcgcttcctgagtgaggcaatgccttgccctgcttcggctcgcacacggtgcgtgcacccactgacctgcgcccactgtctggcactccctagtgagatgaacctggtacctcagatggaaatgcagaaatcacccgtcttctgtgtccctcacgctgggagctgtagaccgtacctgttcctattcggccatcttggcttctcctcttatcccagaaatttcttaagtattttgttgacctgcatacttccttgaatcaaaatgttgaggttaatagctaacctactgcttgctgcttcttctagcactattatattttaggaacctaatggcatctaaggatttcaccgtgtaataacagtgggaatttatttttcttggtgtttggaaactctcaggaatttttttttcctttttcttatttttctctccctctcaattataggttgaagctccattcataccaaagtttagaggctctggagataccagcaactttgatgactatgaagaagaagatatccgtgtctctataacagaaaaatgtgcaaaagaatttggtgaattttaaagaggaacaagatgacatctgagctcacactcagtgtttgcactctgttgagagataaggtagagctgagaccgtccttgttgaagcagttacctagttccttcattccaacgactgagtgaggtctttattgccatcatcccgtgtgcgcactctgcatccacctatgtaacaaggcaccgctaagcaagcattgtctgtgccataacacagtactagaccactttcttacttctctttgggttgtctttctcctctcctatatccatttcttccttttccaatttcattggttttctctaaacagtgctccattttattttgttggtgtttcagatgggcagtgttatggctacgtgatatttgaagggaaggataagtgttgctttcagtagttattgccaatattgttgttggtcaatggcttgaagataaactttctaataattattatttctttgagtagctcagacttggttttgccaaaactcttggtaatttttgaagatagactgtcttatcaccaaggaaatttatacaaattaagactaactttcttggaattcactattctggcaataaattttggtagactaatacagtacagctagacccagaaatttggaaggctgtagatcagaggttctagttccctttccctccttttatatcctcctctccttgagtaatgaagtgaccagcctgtgtagtgtgacaaacgtgtctcattcagcaggaaaaactaatgatatggatcatcacccagattctctcacttggtaccagcatttctgtaggtattagagaagagttctaagttttctaaaccttaactgttccttaaggattttagccagtattttaatagaacatgattaatgaaagtgacaaattttaaattttctctaatagtcctcatcataaactttttaaaggaaaataagcaaactaaaaagaacattggtttagataaatacttatactttgcaaagtcaaaaatggcttgatttttggaaacaatatagaggtattcatatttaaatgagggtttacatttgttttgttttgtaaccgttaaaaagaagttgtttccagctaattattgtggtgtactatatttgtgagcctagggtaggggcactgctgcaacttctgctttcatcccatgcctcatcaatgaggaaagggaacaaagtgtataaaactgccacaattgtattttaattttgaggtatgatattttcagatatttcataatttctaacctctgttctctcagtaaacagaatgtctgatcgatcatgcagatacaatgttggtatttgagaggttagtttttttcctacacttttttttgccaactgacttaacaacattgctgtcaggtggaaatttcaagcacttttgcacatttagttcagtgtttgttgagaatccatggcttaacccacttgttttgctatttttttctttgcttttaattttccccatctgattttatctctgcgtttcagtgacctaccttaaaacaacacacgagaagagttaaactgggttcattttaatgatcaatttacctgcatataaaatttatttttaatcaagctgatcttaatgtatataatcattctatttgctttattatcggtgcaggtaggtcattaacaccacttcttttcatctgtaccacaccctggtgaaacctttgaagacataaaaaaaacctgtctgagatgttctttctaccaatctatatgtctttcggttatcaagtgtttctgcatggtaatgtcatgtaaatgctgatattgatttcactggtccatctatatttaaaacgtgcaagaaaaaaataaaatactctgctctagcaagttttgtgtaacaaaggcatatcgtcatgttaataaatttaaaacatcattcgtataaaatattttaattttcttgtatttcatttagacccaagaacatgctgaccaatgtgttctatatgtaaactacaaattctatggtagctttgttgtatattattgtaaaattattttaataagtcatggggatgacaatttgattattacaatttagttttcagtaatcaaaaagatttctatgaattctaaaaaatatttttttctatgaaattactagtgcccagctgtagaatctaccttaggtagatgatccctagacatacgttggttttgagggctattcagccattccattttactctctatttaaaggccgtgagcaagcttgtcatgagcaaatatgtcaagggagtcaatttctgaccaatcaagtacactaaattagaatatttttaaagtatgtaacattcccagtttcagccacaatttagccaagaataagataaaaacttgaataagaagtaagtagcataaatcagtatttaacctaaaattacatatttgaaacagaagatattatgttatgctcagtaaataattaagagatggcattgtgtaagaaggagccctagactgaaagtcaagacatctgaatttcaggctggaaaactatcagtatgatctcagcctcagttctcttgtctgtaaaatggaagaactggattaggcagtttgtaagattcctcctaactttcacagtcgatgacaagattgtctttttatctgatattttgaagggtatattgctttgaagtaagtctcaataaggcaatatattttagggcatctttcttcttatctctgacagtgttcttaaaattatttgaatatcataagagccttggtgtctgtcctaattcctttctcactcaccgatgctgaatacccagttgaatcaaactgtcaacctaccaaaaacgatattgtggcttatgggtattgctgtctcattcttggtatattcttgtgttaactgcccattggcctgaaaatactcattgtaagcctgaaaaaaaaaatctttcccactgttttttctgcttgttgtaagaatcaaatgaaataatgtatgtgaaagcaccttgtaaactgtaacctatcaatgtaaaatgttaaggtgtgttgttatttcattaattacttctttgtttagaatggaatttcctatgcactactgtagctaggaaatgctgaaaacaactgtgttttttaattaatcaataactgcaaaattaaagtaccttcaatggataagacaa

SEQ ID NO: 409 - DNA, 9287 bp, Homo sapiens
caaccatcctgaagctacaggtgctccctcctggaatctccaatggatttcagtcgcagaagcttccacagaagcctgagctcctccttgcaggcccctgtagtcagtacagtgggcatgcagcgcctcgggacgacacccagcgtttatgggggtgctggaggccggggcatccgcatctccaactccagacacacggtgaactatgggagcgatctcacaggcggcggggacctgtttgttggcaatgagaaaatggccatgcagaacctaaatgaccgtctagcgagctacctagaaaaggtgcggaccctggagcagtccaactccaaacttgaagtgcaaatcaagcagtggtacgaaaccaacgccccgagggctggtcgcgactacagtgcatattacagacaaattgaagagctgcgaagtcaggtgagagatgatgcttgtgtttcctactctgtgtttagcttcaagataaatcaagaggttatctatgttaggtaggtccaaatggactttgtaaagcaaattaggctaaaatgttacatctataaaaattctttcatctacctttagtgctggagtacctgactgtacaacaggatgaccttaaatcatgctatttttaatgtttaacacaattacatacaaaatatgaacattttatcctccggaataaaatgaatctttgtcacagcttatcacatcagggctaaatgtatagtgaacaatctttctgaaaagagctaaaaattaattacgtgataaatctctcttagtttttcacctagtccttatcaagttttgaaaccccagtaaattcaaagacttttctccttttatttaagtaaatgttataatatgactattagaatactgtactgcagatttaaatagcaaagtgattctgggtggaaacagtgtggcaggaatatgggtcttaatgatgcctggatttttaagtgccctgtttaataacatgaccatcagcatcaagcagttcagaaactacttctacagtaataaaatgttctattgcccccaattcatgtttattacaatcatatcacaacctcctcctatgtcatcaaaaaaagggtggagctctgtattttatcagtttcatggaataaaagcagaagactttgctcctaattgaaaatttcagatatgacacagagcacttgcttcaaattaaagttcttatctaattaagaaaagtgttcactgtaatttgtgttaagattcatactcctttagagcaaagcgcatttacttaccagcaagtctgtttttcttgagttgtactaaacatcagggcaatttgattcggactccatgggaagttactttggaattttagaaactatgggcatgtgaagcaatggcatttaaatagcccttccggaataaagttcatccttcgcaagctctcactaaaaatgttcgaaccacacctgtctcgtgtttctgactctagtttggttcatctgaaatacacaggcacaggccatccgtcccattgagctggacagtcccaaccataggaagcagccctctccaaaactgggtccattgaaagagaaatgtcattgtaacatcttctgcaagtagatttttcatctatatgcctccatcatgcatttcgttctttcatgcatcatgttctttcattcagccaatactgaatgaacactaactaggtgctgggcaccatgctggggactgaggaatattatggtggacacaatatgatttatgaggatacagggatggacagagggaccagcacacagagggataatgagagcacaggcagatcatccagttcagttttgagagcatctgtgaaggctcctatgaagcaatgttgtcgaacctgagacatgagggaggaatgggagttcaccagaccacaggggctaaaagaaatgtcctaagtagaaacatcaaaggcaaggcactcaataaggtgtgatgactcaagttgagttaaattatccttctgtaaaatcacaagaaagtagaccaaaccctggggcatctagagttgcattttatgactctgttatgttaaataactatgtcattattttttctatatattttcatgtagaaatacttgaaatgaacatcatttttgacataatagtcactgtagctggggataaactaaatccttgtaaactcctatccagttgaaaatgtcattcttggccgggcacggtggctcacgcctgtaatcccagcactttgggaggccgaggcaggcagatcacctgaggtcagaacttcaagaccagcctggccaacatggcaaaatgctgtctctactaaaaatgcaaaaattagccgggcatggtggcggatgcctgtaaccccagctactcgggaggctgaggcaggataattgcttgaacctgggaggcagaggttacagtgagccgagatcgtaccattgcactccagtctgggcaacagagcaagattctgtctcaataaataaataaataaataaataaataaataaataaaaaagaaaatgtcattctttctcatgtattttccagattaaggatgctcaactgcaaaatgctcggtgtgtcctgcaaattgataatgctaaactggctgctgaggacttcagactgaagtaggttccctaatacgtggcaaaagtttctgaaaaagaattcctttagtagtccttccagatactcagctttccatatcattgttgataaaggaagcacggttcaatgtccagaatcctgaagcctaaaggaggttagaagctacatgtatgaagctaacccagcactcagggatggccttctctttcttgatcccccggcatgtaactaaacacctccagtaactactattctccttggttattactggttgctaaatttttttttagtaacctggtatctaaacctaattctgccctttggagtaataacaaagtaatttacaattctccttctccctaagtgcctttctgttatctaaagagagtcttgtgtctacccttggtgattctccaagtaattctccacgttcattcaagtgcctgcaagtgtatgacccaagttccaggggtgactcttgatgatttctggcttgccagtgttttacaggatggtctggccaaccaaagaaccaggaccaatctataataattagctgggcgtgatgccgtatgtctgtaatcccagctactccggaggctgaggcaggagaatcgcttgaacctgggaggcggaggtttcagtgagctgagatcgtgccattgcactgcaacctgggcaacagactgagaccttgtctcaaaaaaaaaaaggaagaaagaaagaaaagaaaaagaaagtaaaaattgtgttcactttctttgtagtcatcacaccacatgtgaccagacctgttccttgcaaacagcttccacactaaggcctcttcatcctgaatttgtacaatgcattaacaccaaaaagccctttgtggttagaagggtagccttttaatgctccaagggattaacaagaaggaaataggaaatcaaatccaaagatgaaagcagtaaaggtgcattacttccaattttacctagcactgagtgtcacattgcagtgtcattttttaaagttggatattttaggaaactgggcagggcatgcatgatggctaacgcctgtaatcccagcactttgagaggctgaggcaggaggctcacttgagtcctggagtttgagaacagcttgggcaacgtggcaaaaccacatctctatacaaaaatacaaaaaaaattagctgggcatggtggcatacatctgctgtcccagctacttgggaggctgaggtgagaggattgcttgagccccaaaggttgaggctgcagtgagccatgatcacaccattgtactccagcctgagtgacagagtgggaccctgtctcaaatacacacacacacacacacacacacacacacacacagtgtgtatgtaagattgtagaggaggatgtagagctgtttgagataattcactttggatgtctctgttcacaaagtaataaaaataaatcgatcatgtacattcattaagtaaaactaaccattatttaatatcaataataagaaccctttgccaacacaataattaacacaatttaatttcttataagataaattctagaatttagaagtgttcaaaattatttcagattgcctttttaccagtcaccccaaattatagagattatattattgagcacattttctgactcctaggttcttatgtaaatttcatgattgtgtaaaggcagacattataaagtattgaaattgatctcctcataagccacatttaaaaacctatcccattatattagattctctccttataatggcttcagaaggaccagttatctctgtacactaattaattcacaggtatgagactgagagaggaatacgtctaacagtggaagctgatctccaaggcctgaataaggtctttgatgacctaaccctacataaaacagatttggagattcaaattgaagaactgaataaagacctagctctcctcaaaaaggagcatcaggaggtgagaaaatattcagaagtggtattggaaacaatggaatggttctatataatactaataataggaggagcgggagaaacaggagaagggggaagagttggtggtgatagtgacagagatgatgacgatgacaataatgatacaagccctaccttcttttcataatgttgttgtaagttaaatgacttagagcagcacctggaccacaataagcccaacacaagttattattttatatcttttttacttattcccaatgaaagaggtcatgagactccttatgtcttttctgcccagccttatctgagaatgtgcttcagactaaaatcaatcagaaatttcactttcataggaagtcgatggcctacacaagcatctgggcaacactgtcaatgtggaggttgatgctgctccaggcctgaaccttggcgtcatcatgaatgaaatgaggcagaagtatgaagtcatggcccagaagaaccttcaagaggccaaagaacagtttgagagacaggtaaccacacaattctaaagggtgagcaaacgtgtagatgctttcctccagaaacagataactcattttctttttcatttgttcattcttcctttctctttctgtcttttctttcttatttccacccctcaactatttttttttcactcttggcactgtagactgcagttctgcagcaacaggtcacagtgaatactgaagaattaaaaggaactgaggttcaactaacggagctgagacgcacctcccagagccttgagatagaactccagtcccatctcagcatggtaaagcatatctaacttctctttctcaatctagtatgtgtttaccaaggtcctctgttaggaactatagaaatgcaaagacctacaagaaataacccttccccttgcagaactggcagggaaacaggccgaacaactgattataattaaaggacagagagaaatcgaggaaagggcaatgtactgcatgaatgcagaggaaagagtaaatctggaagatttcacagggaaagtggcatttaaaccagatcttcttgtaacttttaagttcaggagtacatgtgcagatttatgatgtagttaaacttgtgtcatggggatttgttgtacaggttatttcatcactcaggtattaaacctaatacccattggttatttttcctgatcctctccctcctcctaccctccaccctctgttaggcccccatgtctgctattcccctgtatgtgtccattataccagatctcaaaatctaagataaaattttaagatggagaatggactagagacattccaggccaagcaaatcagcaagcccatgacaaattatgttgtggtaagcagaatccctcaaaccacagtggcctgcagccatgatactacatccaccgtgacatttcctttccaagggcaaggctaaaggggtaggccctacctaggacatgccagtgtcctggcagaaagaaaagagcaatggttggtccacttgatagctcttaaagcttctccttagaaaaggcatttgtcctttgggaggccaaggcaggaggatcatttgaggtcaggaggttgagaccagctggccaatatggtgaaaccccatctctactaaagatacaaaaataagctgggcatggtggtgtgtgcctgtaatcccagctacttgggaggttgaggcaggagaatcgcttgaacccaggaggcagaggttgcagtgagctgcgatcacattactgcactccagcctgggcgacagagcaagactccgtcccaaaaaaaaaaagaaaaagaaaaggcatttgtcagtttgacctgcattttattaaccaaagagagtcacatgacccagccaggtgtcaatggattaaaggaatctaatcctgcaattgagaaatgccacagatcacatggccaggtctgatgaaggagtgagaggtataacatcttcacacagtggggaagcaagtactgagaacaatgctacaatgcgccgcactgaaagaacagtaggtgcaaagctacaagcaaagaaaaaccccaagagctaatgatcctagctggctggctgaggttgcctagttgggaagagtgggagatggagctagaaatatacaccatgcccacagtgatgaactgcagagacccttctcaaaggaaattaaaattaacccatctcttgaatcaagtcctcacataagaagtgccctatttttcttgtgctcatagaaagagtctttggagcacactctagaggagaccaaggcccgttacagcagccagttagccaacctccagtcgctgttgagctctctggaggcccaactgatgcagattcggagtaacatggaacgccagaacaacgaataccatatccttcttgacataaagactcgacttgaacaggaaattgctacttaccgccgccttctggaaggagaagacgtaaagtaaggctcttagaatcaaggaataggtgtcaatatctgtatgcacttctattttaatgtccctgtcactcattacccagcaccaatgcaatccctaggacagaagcaattatactcacacatgcctcaccacgaacaacaaaacgaaaatataccaaaaaatacacacacgcccaaaatatcaagtacagccttgagatcatgtggtaggactgagttctaccacatgatcatttggagataattctccaaatgatatagattatgctgatattaattttcatcattaatatataattgaaggcataataaccttttggaaattctaattgagagctcatgaattagacaataagctgctgaggtccacgggagccagtctgagaatcataagtgtggcagcagcaactgtcttcagataccatacctaagaatatcaacaagagaacacaagatttaaacttccattgtaattttgttattttaattagaggaacttcttagcatatattaaactggtcagttttaaatctatgtatttttcaagttaaaaagtaaaatgctcaagtttgcaataaaagcaatgtaaaagggaaagatatatgaaagcaataacacattcacttggactttgaaatataaaagacaggagtgcattccattttcaaaacagcaataatgcttttttctgtttcttttttcttcttttcattaaaaaaaaaaacagaactacagaatatcagttaagcaccctggaagagagaggtaagttctaaatttttgcacattttctatgacattcagctgctttctattaactacatgccactgataaaaagtaaagtgaggctgttttagtctgttttctgctgctgtgacagaatacctgagactggataatttacaaacaatagacgtttacttggctcacagttctggaggccagaaagtccaatatcaaggtgccggcatcttgtaagggccttcttgctgtgtcatcccatggcagaaagtagaagtgcaaaagagtgtccatgagaaccagagagcaagaggaggctaatctttcttttagaactagcccactctcacaataactaacccattatcatggtaaccacattaatccatccatgagagaagagccctcatcatctaatcaccttttactaggccgcacctcccaacactgttacattggggattaagttttccacacatgaactccagggaacacattcaaaccatagcaaaggccaattctcaagggagcagatatgacaccagggattctaaaaatcttgtacatggcataaagaaaccctccacatgggaacttgggcacactcctcagaatggggtgattttcttggcctgtgctattgctatcttgaaacatcctgacatcctgaaaaggaaaaacaagacaaaatttgaattccacttaaattcaagataatttatttcttgaatttttaagagtaggacatttgtaaatttggggagaagcacattttctgcatctatttataaaatggacttaagattttttgagaaagaggatgggtttaacatatttttctaaaagaaggaaataagtaaaaagaataataatttaaagttgaatattataaatcagcagagtcatgtgcctgaattaacatttaatgtttaatatgaattcagatataaagaaaaccaggaagattaagacagtcgtgcaagaagtagtggatggcaaggtcgtgtcatctgaagtcaaagaggtggaagaaaatatctaaatagctaccagaaggagatgctgctgaggttttgaaagaaatttggctataatcttatctttgctccctgcaagaaatcagccataagaaagcactattaatactctgcagtgattagaaggggtggggtggcgggaatcctatttatcagactctgtaattgaatataaatgttttactcagaggagctgcaaattgcctgcaaaaatgaaatccagtgagcactagaatatttaaaacatcattactgccatctttatcatgaagcacatcaattacaagctgtagaccacctaatatcaatttgtaggtaatgttcctgaaaattgcaatacatttcaattatactaaacctcacaaagtagaggaatccatgtaaattgcaaataaaccactttctaattttttcctgtttctgaa

SEQ ID NO: 410 - DNA, 24288 bp, Homo sapiens
aaacagccttttgggacctgtccccggacgaggactgcccccctccctcgggcaactactactgatgctgtccaggcatcgcccaaggggaaaggttgcagcggggtcggaaggcgcgggaggagtctggcggtgattgatgggaagggatgaatgaataaaagtacttgtctgatggcagcagagaccccgagcaaacggtggaggctacactgtctggcattctcgcagcgtttcgtcagagccggacccgcctgcagctcaagggaggcgtgctcctctcccagagcaggctggaacccagctgggttccgcctcccgggaaggtggtctccattcgtcgctctgcatctggtttgtcagatccgagaggtaaacattcgggcttggtgttgaattaaaatcattgattgaaccttattctggggcttcggtttggcttactagtttgggattttaaaaaaataaaaattaagcctatagagagggcaaattaaaattaggttgggtaaaggaaggagcgcgagtgtttgaagccgtttggagggaacagcggtttccaagttcctgctgacttgagaagtctctgcgggtttccgaatctccggcgcactcctgggcgcgctgcgggagctgtagctcagccagccagggagtagcggctttcatccgccgggaggagtctttcgagttcaatcgcggggtatagaggttcccctgcggggcaaaatgcagagcttgacacaagcccttggcctctaggtgccttaattccgcggttcccacgcacgcttaactaagacgtgtctgtattcctcccgttacgtgaaagagttcggagctttgcctgggacccccatcattccctccctggcacaccccttccagaacgccccgccccactgcatattatttacccctcctggccacgcgggggaagaaaaacagctgagagggcatcaggaaggagtttcgacccgcgctggcgagtcatgagcgccaagtttcccactggcgcgcaaacttgagttacttttgagcgtggatactggcgaagaggctgcgggcggtattagcgtttgcagcgacttggctcgggcagctgacccaagtgtcctgtcttccttcctctgcttgtctctaggctctgaaactgcggagcggccaccggacgccttctggagcaggtagcagcatgcagccgcctccaagtctgtgcggacgcgccctggttgcgctggttcttgcctgcggcctgtcgcggatctggggagaggagagaggcttcccgcctgacagggccactccgcttttgcaaaccgcagagataatgacgccacccactaagaccttatggcccaagggttccaacgccagtctggcgcggtcgttggcacctgcggaggtgcctaaaggagacaggacggcaggatctccgccacgcaccatctcccctcccccgtgccaaggacccatcgagatcaaggagactttcaaatacatcaacacggttgtgtcctgccttgtgttcgtgctggggatcatcgggaactccacacttctgagaattatctacaagaacaagtgcatgcgaaacggtcccaatatcttgatcgccagcttggctctgggagacctgctgcacatcgtcattgacatccctatcaatgtctacaaggtaaagggcgcctgctgaaatcatggtgggcttgaggaagggggcctggttggagacggggagatgagaaagcttgtagagggagcttccctttagctccctcttaaggttctgcccctcctaaaagtcagtaatctttggaaccaaattccatttggttctgtccactcataaaagtcagtaaccattggaataaaattccattcaggtcttcagtagacctctgctaagcttaggacaagcgtagtccccagtctagcaatgttagtatcactttgggaacttggtgcacatgaagatttttctggcctcaccccagacctactgaatcagaaactctggagtggagcacagtaatttgtattttaacaagccctttatgtgattatgatgaactgtaaagtttgagaaccactagtcctgaaggatctagtccctaagtgcacctaatggggtacatcctctagtcaaaagtgtgtggtccatggacagtcagcatcaatattacctgagagtttgttaggaatgcaaggctacctcagacttactaagttagaatctgcatcttaagatcttcatgtgattgatatgcccactaactttgggaaggactgttttggaagactttgaaagtagcaggtacaaagtaggtatttaggaaataaatggcctggaaaaaagagatccagactggtgagtaggaaaaacacagttcacctgctgtgacggactgtagctactttgtattaaatatctacagtgggccaaggactgggtgagatgtgttacttccattattccttccagcagcccacaagtagatattacaattagtttacagatgactggtaggatgatcaaagtaaatgaattagaggtggagctggggatcagacccaatctgtcaggttccaaagtgcaagctatatgatggcaccccatcaattatttcatggacaagaccaaggagcactcaaaatctgtaagggtttcggtagttaacattattgtgtgattaccatgggcgtcagtagaaacacacaaagagccaggttgctccaggttgctttggaactccagacacatcccagcacctctgggcctcagtttcctcaattccacaataaggctgccagtgcccacttactgaggctttatggtgttaaaaaaaaaaaagcagtctaaataaaacagttggaaaatttcaaagacatatgaaaatatttaaaactttcccagcagcagcagcagcagcagcaatagaaagttgcacataaaaacacaatcacagtgtaaggaaatggaattgtgctttgcagatttgcctatagctagccctgacttcagtacttcagtacaaggggaaaaaaatggaatgtaaagttgggaaatgttgtagggaatgctttgacctattggcaggagtagttaccataaggcatgcctgtaaatttcccttcataaatctctaaaaatcctaacccaatagctatattttaaggggaattccgaacatttctgaggtttagcggtgagagtggattaggatatagttttctctaaagggaatcacccccggaaatgggggaatcgattgaagaaatcctaaaatcctgtatggcaattgattctgatgaactgtgaggatttacttggtaagagctgaaattgaatctctaaatgcagccacaactccatgagggccagaagtgacccttttacttcttaaggcgtcccacaaactaaatcttcccattctaatttggcaaaggaatttcaattcaattcatcaaaaccgaattgagaacttttcagtacaaggtgttgtgataaatttaaaataaatctaacaagatctcttcccaaagggagattaaaatctagttttgctaggttggcacaggattttatgaaagttctgtttagggggtcaggaaaccccacatgtccagcccagttagaaacctttctaaatcagacagtagctgaagtgctgtgtagaaggtgggattgagaacatttttttagttctggtgtgctgcctccaggacagatataaatcagctcttccagaaccatcttatttcctctgtctggttaaatgagtatttgtaataaactagagaatttctgactccccaagaggtcatacagtttccctttcatttcaaactcccatatgatttccctaggaagttacatccttttccctgaagccatccagtcttaacatgactgtgtttttacttctgaaataagccaatgagtcattataaatctgtccatccattaatctacatgggtcacaaacacattcatcacattacgtcccatcactaaggtcatcattattgaatcctaccttgtggccttaggtttagcttgagacacaatatcataataatggctaccagttaatgatgcactaggcacttggtttatttcattaagtcactataacaaccctgtagaggaggtatcgttatcattcctgctttagatctaggcaaactacttgtcagagaggtgaagaagtaacttgcctaatgtcataccactacaaagtaatgaaactggggcttgaaagcagatcatccagcccaagaccctgtggtccaccccatcccactgcacaaagcatgctcaggcactgcatggtcatctccaaccttgagtattgttttaggatctcatttgggagcatttggtggaattatggcaaataatatgctatcccacagtagaatacttggtaaacattttcagaaattaatttgagtcaggatttcggtctcttgaaacccccttcagctggtctgtagtgtgtaatatcagtggaagttattctaatggcttaatttaccaaaatatcaaatccaggaccagttaaaagccatttattctcctaaataattgtggcaacgtagtttttttaatgcatttagaatttcagagtagtcaggtatgatcattcagaaaaaagtaatttaaatgagttatgaaggctatatttaatatatcctaatatgagaggcttaaatctaaaccagtgatttctaatttttttggtggggttttataattctctttgagaattcaatatacacaatttctgggggtttgtgaaattctcctactctcttgttggcacactaagggcccagaggcccagaaatgtcaatgtgaatctattccattaatctagagtttaatgaatatagagttcagtaaagttgacaaatcacaaaatgtcatagctcttattggaagctacagtcttcaggctgtggaattggtgggactttatctggagttgctgcagtgggaagctgaaaagcattgggaaacatgtctgatctgcctggacttcctcaaggagctgggtccctggaaacttttaggaagaatcataccactctcacaggtctcctgtgttgtgggtgaaatcctgtgttgaaggctagggaagtgtctgaggacacttagcaagttgaggctgctgaagaactttaaactcatgtaaacatgcagaaaataataagcgttgcttacgcttctcataggcacacactagggctatgcctacattacacaacaccaaccagaagaacaatgaaaacttcaggcatccaaaggagatatttatttaaatatatatgcacgtgtacatgtacatacattaaaatgttaagttttataagaatatataagtaaaaagatgactatcatttggcacagggcatggcatatagcaagaaatgataaatgttattaaaatgtgtgtatgtgtgtgtatgtgcgttttgagtattctttgttttccagcttttgtcgtgacaaacatgactacaaacgacatgtttgtacatatggctttgcacacatgtgtgactacatctgaagggtaaatttttataactggaattattaaatcaaaatgtgtgtgcattgtaattttgaaagatattgccatattgtgctagaaagttattcttgtactcttggtattaatcactattttatataatatctcaatatggatgtaaatgcatattaatgtttatctgtaatatgtatatgggccaccatgcttaatatttacatagtctacatatacatcagaaccaaaagccagtgcttgactacctgacgttaggatgaatttctccttattcacaagctacttattttgcccttcctatatatcctaaaataaatggggtaatctagatatttgttcacatgagagcctggtgttccactactaagttgtagaagcatagatatcaaagctggataaaaagcaagacagccgggtatacttggggatgctatcaatgtgtttatgttgttgtttggttggttagttgatttggcttggtttgctttggcaatgatatttaacaaaacttggttgtaggttgggagaagttaaaaattcttgagcaaatagtgagttcttaaattacttctgaattttattaactctctttatgttatatttacatggataactgagttaaagaagttagctctcaaatatagcttcctttatgtgtaaagaaattgcatttaaaaacaaatctacttgcaaactgataagacaaataccaatatccacattaactagtttggtaaggatccaaaggtaatcaggtgtccagtggtgatggagagctagaaattaggctggtgacccactggagtgcttctagatggttttacagttaagaactgtaggctactattagaggcaaagaggctgcattcatagttctgaaaggcaaaactgctgatctttaacgtttaactagttaagggtgggaacatataacattaaaatgctggtatgtcaaaatgcggaattgcttcactgaacccacaaatgagtttcgagtgaagtgaccttggcaggtaatcagacattttctgcttgtgacacaatcaggattatctttctgaacaaatttaccttttgcactatcctcttagactacttctggtacttaacaagtttatgtataattaactagttttgtagttaaaagtaaaagttgatggaacaccaccaacttttgaagttataattttccagtcagtaaactgaagtatattcacatattccaatcagtaaactgaagcatatgcatatatagcaacacaagaagtaagggtatcattgggagaggagtctaatttatcccagtttaataacaatgttctcatttccagtcaagtaactgaaatattttagtaatatttaaagatattttaccagcataagcattctgaaccaaaagtggaacctgtatgatttatgtaaagcaaaataatttttaaggagcaccaattaagtgcatttaaagtattaacttttaaaacgtgttaattaaaagccaggcttttagcttgaatgacctggaatcagttaacaatacagcaaataccctgacacccatctatcatagtggctgcaactgtcaatactacacaaatgcttcagacaaatgatgttatacagaagacataagagtagtgggctttttccactcatatttttactgatgtccaaatgaaaaagaaaaagaaagcttgattccttctgtattaaagtattgtcatagtcagataacaggttgatagcagaattcaaatcaaccagaaactcagacttcatattcccaattcactgtttcacatgttggtcatagatttctgtgacaaaatggtcagtaagcacttggccttgggcaatgcaaggttccctaggttcaatttgatggtatttcttgtgtgtgcctttgatctgccacttggtcactccgtaaatccaagcctctacaaatgtcaaggtaaggttttctttcaatatggtaaggcttatctatcaaaaggtttacatttctcagtttgctcatttaaaatgagtctttcaagattgaagatatttccatagttgtacaaaaggataacgtagccaagaccctgttgtctccaggccagggagccatgttcttcaattcacaaagaaaaccatataagggtatctctgtgtagctaatatgctatagttgattatttttagagaaacatgccaaatgctaataaatgattaagttctttaaagggtgttgacagataaagcctgagctgaaataagattcaagatgtaatttatgatgtgaaacattctctttcaggactttgcacagttaaaaagaagttggttatgtttgggagatagctgaatgtggtgtgtgggtataccttagccaacaacttctctaattttagactttttattatttccaaggcttttattttagagagttatttatccttccctgtagggcctctggtgaaaatgtaaaggaacaagaaaatggccaaaatgtggtggtggatgggagagagggagagagagaggagaaggcgtgaagggagaagatagaagaggatcattcttgaatcagaaatttattagcaaaattgattgaagcatttctcaagcaagtctccccttttgaggctcaaaactgcactcatgcctgctgacctgtgtcttttccccacttctgtcttcttcagtttcattgtagtttccagaaaggaggaaaactatcctcagaatgtttacactgtacgctgtcttcttcccactcactcagtgtgttcagcctattttaatgagctttcagattccatagtaatcagacattttctgatcacagcttattagtctcccataagatattccacagatagaattaggcttaggtatggcatgaagttacttaataaggtttgttgaattcatgtagtttgcaagtctcgttctgagccaggaggccctcaggttctcattcttctgtgtcttcagatatcaccagtgatcttagaagatccagctcagataagtgaactaataataggccaggtttgtgaatggggtttgttatttcccttagttggatcttttcaaaatatgtaatatgtcggtgatagttttaaagctcaaactatggatatatttttaaatttagataataaaagagtacaatcaatttctttcctggcctgttacagactcagaaataaatttctggtaggaaaatatatttgaggtaaacttcaatttctcttaagaaatatttttaaaaaattgttttctatctctatgtttctcttagagattttgtttcaagaactttaattcattttcataagccattgttctatttcagcaagttagaggaatctttccagagctgtgaaaaggcctctgttttgtggatgtgtgtgaaatagattcccatggacagaaccgctgccttgcacaactctagggggcactgtacttattgtaatctattgagatggcacccctgggggataagctaacattatttctgacccacatatttctaactcacataggctaatctttaagtgattaagggcattctgatggatgcagggtagaacttgtaatttatatttgtccttcagggcacggtgcactgtatgtcaagaagaaaatatttccatgcacttgatcagcatattgactccaaattcaaagcttactttgaactatttctttgtgtattaatacagaaagagttctggcatggaagtcctttagtgaaggtgccctatctcattaaaactctagttcaaacacagaaaaactcttaactactacaggaaacagagacaaaaacagaatacaccctttcctaaagttgtgaaatgcagccattccattattttccttttttgactcttactgtgaaaacatttatataatgccagtcgtttaaagaaacgttcacaacttatcacaggatggaatagactgcagtctggcaaagtaatcttggttgtcctcttaattacaccactcactcatcctctaaaacaatcatctcttacaatgctcctatgtttactgcatctacttccacgaaacttaacaatcctctccacagctgaagctcttcatagactcccattacatagtgagaaacagtaggttctgttttgtatcagtcattgccttgacaagtttgagtaggagagagagggtgggagaggaatttttgtcgttaccttttccgccctgcatggaagagcagaactccaacaagagtccagcccactctcaagcctcaattctagagtttctgactctatgtgccaagaagacctgatcatcagtactagaaaatataaatagtaaatatacagtcatgtcaattatctaaagaatatatgtagagtatgagaactgaaaagctcatgacaaatgttttgtcatagatgatttctgccgtgtgatcaaattcattcatccactcatccgttcatcgttacttaacaaacattgaatgagtgaccactgtgtgccaatcactgtactaggcattataaatgttgtagaatattctgaaacaaataaacagttaaagctcaatgtacatttgtaatttaataaagtagaaaaagaaaatgctatctatgtttaatgaggtgagtgaacatttgcttgtacaagatggttaactttgacatttcctgactttatggggcttgactccttttggcattaacaggggtgtgtgttaacaggattttttttcttcatttattatctcaagtatgtgatttttaattaaaaagagaaatgaaacatgtaaatcccctggttagagagattttgtaggattcacttcacaaaaccctcaaataagtaaagaatatttgtttcttattcatgctatttatccttttagaaaaattttaaactataatatcaaaatgactttataatgtaatagaataatttatttggattctcttgccttgtttctttctcaagcagctgttccaaggtaaagttataaaatcacggtctttcttgagtagaaatcttttagccagtatggccacaccttttttcaatctagtgtttatttatttgtgtttatcatccaaaagaaatgttctagagaagcagtataagccttagggtaaaatgggtcagcacaaacataggctatcattttgtcaaatggataccatattgccagcaggacttaacactaacaacagctattcagttagatgagacatcatgatatgaaaaccagtgccagttatgtgagtattgccaactggctcatatttgatcaatgttaggtaacatatattcaactgaattttaaacaggatttaaaattttaatttatgtggaagcgacatagtgtcaatattaaactctaaacaccctttttgcgatcagagagacagccttttgattacatgtttgaattgtcttcactgttcagaccttgcccttaagttatctaatttaatggggtaaagtccaaagaaaaaactaaaaatagggaataaggaatgtgttattgctgggtttaaagttagagttgcttcctcttgcaataaagtgaatccatttcctcttcagtggggaaagctgtatccttagacttcaaattattgatgttagatgttgttatttttcccaaagaatgatgaagaaatgaatgtctaagaatcatacccatctataagaacaatctctcaccaaattttaaagatggcatcttggttgagagtgaatttttttttttttttttttggcaaaacttcatagtttttccccaccagggatacctttatattttaggtaagcttcaagcactagcttgcctaaagactttcttgctagaggccattaagatgacagagatgagcatcaatagtgggcatggtttctgtcacagagtatcaggctttgctgggtctccacaaagccttctgatcagtgaggcagaggttaagatttttaaaggaagagcgtttagagtctcgccaaagccatccttctcactacaaaataatggaagcaacagtgcatgctcttcccacatcttctatggccttccagagccaatagcatccagttctaaattgaaagcatgaaatgctgaaagctgataaaggttaatgctctctctctctttttttttttttttttttttttgcagtctctttcccttcaaaagtgtagactagaaaactgtaatctctccgtggtgattacgtgtctgactatctctctgttgagcttgaagagcattgttataattttcagtttgtgtttccctgttttctgtgatagcttgggtcagaggttgggctgcaggcctccagtggtatgaagagcaataatccaatttctaggctgagccaaaaacaatggaaacctcaaaacatggcctggattcagtgcagagctcattttcatcagccagacttctttcccttcaatggtctggacgctcattcatcttgattcttctgatagccatacctacaggataacaatattaacatatttggaaataatttaagacagaataaaatattttaaaatatccaaatgtttgtacattatttgaataaaataactagggggattagtcagggttctccagagaaacagaaccagtgggatagatagatggatggataggtagataggtagttagtagacagacagataaatagataatgaggaattggtttatgagattatagaggctaagaagtcccataattggccatttgcaagctgcaaatataggaaagccagtggtgtaattcagtccaagtccaaaggcctgagaaaccagtctgagggccaggggagatgaaatgagacattccagataggaagaaaaaggggcaaattccttctgcctctgccttttgttctattcaggccctcaagagattggataatggccacccacctagggtaaggcaatctgctgttctgagtccacaaattcatatactaatttcttccagacacatcctcacagacacactcagaaatagagaatgtttaattgagcaaccagtggctggtcaagttaacacataaagttaaccatcgcactaggtgagcagaagattttgctctgcatctagatattttactattatttgacacatagctataggtttaaaaaaaatttgatttaattctaaacattttgttttgtacaatcacctccttcaaaccactgtcgggcaggtattatagtggttgtaagcataggctctagaccatctgggttcaaatgtggatctattactcacttaagtgagcaaacaaatgcaagcaggcatgtgggtttcctaatgaataacaaattaccctacaatttagtggcttaaaacagtaaatattttttaaatcacattgtgtctttggtttggcaattaaggagtggcttagttgggtggccctggcttagggtctctcaagaaggtacatttaaaatactggctggggatgcagttgtccaaacgtttgtctaaagctggaggatcctcttattcacagacgtggcaaattagtgcttgatgttttcaagaggcctcagttctttgccatctggtttctccacagaggtgcttgagtgtcctcatgacatggcagctggcctcccccagaataagtgttccaagagagaggaagccagttctttaggaactagtgtcagacatcacacatcatcacttttgtcacattgtattcattgaaaacaaatcactaagtccaatccacattcaaaggcagggaaattaggcttcatgttttgaagggaggagtaatcaatagcagaatattgtctgaataagttgtaccaggctgggtctagcataatccttgaaaccagttggataatttttattcttatttctaagggtaattggcagttcttttaaagctacatgggttcaaagctggttcagacctgtggtgcactgagtctcccccatttcagtaaatggcttcaccatgcacatggtaaacctctgtgagtgtcctgacttccaacatcatgtgtccaacccatcagcaagtcctgctagctacctctacccttaaaatatatacagcctataacccgctcttcacagcctcagggcgcacaggatccagctcaccactagttctcatcagtgcttcctttcttggccctacattctattctacactgggcagcaacagtgatctcttgaaaaatatgttagatcatgccatttcccttcttcaaaccttgcaatgaactccctcaaaaaaagcattcaaattcttccctctacaacttcattttccatgcatttgggctgggtcagtcttctccagctttagtagctagtagcctcattgctgtacctccagttcaccaggcttgttttgacctcagggcgtttgcacatgctcttgcctctgcctagaatgctcttcgcatggcttactgtcttatttcagtcaagtctctcctcaaatgctgtctcttcagggtgaccttactgagaagcttatcaagaaaacacctcaaatcccaccctcactcaatatgatcacagcctctgtttaacaccattttaagtatgtatgtgttttttgtctgcctccctcactatagtgtaaactccatgagagcaggagtgctcagaatggtgtctggcacatagtgaatgctcaataaatattcattgaatgaatgaatgaacaagcagaattaatgagtcagttgattaacccagaagtcacaagatagaggctatgatggctcacagatgtattttgataatacaatgttatatgagagttttttaaaaatatatatgaattggactttaataaattgtgagattcatataaaaattccaatctgggttctttagaaaaatcaagagatttttgtatttggagccccttagcaaaaagtatgtgatgtctactagcagctgctcctttcagacaaagtttaccccagaccccaccccactccctgtcatcttcctgacaccaatgactttctgagacctggcaccctccacttctctgtgttacctgcctggccctgtaggtcttcaggatcctacattaagcatatatatgataagtctgccaacttttgtcctacatgtctgtgtaagttttgatatctaacttagaaatgaagttggtcctatgttgaatctccaagtcaaattcattatgagacaaacattttagcctttgacgtcattctagttatagaacaatcaactcagcttgacaaactcggtagagtcttcactactagtgaaaggatggaaagactccattgtgtctcaaaataattttcacttttgcaaggttgtttttcaaactatttttaagacccatggatttgaaatacttttattttcaaaacctcatgaacatttgatccagatgttcacctaaaatgattcatttaccagtgtgggacacaccatattgtcctaagaaagaaaataaccacatttaataatagatggtttcatagtctgcagtcagataaagagaaatatatacgtgtacatatatacacactatatatatataacatactatgtgtgtgtataaatatatatctataatagcaataactatgtcttcttgctccttatacagccagtcactgttatattttagagtctatgaatcaagcactgttaatattaaacatctgctatgtgtcaggcactgttctaggcagttgtggagctcatagtctgtcttacactccagggatccagacagaaaaaaatctaagcaaacaaataagttaatgtgttatgccacaggaattgatagactatggataaaaaggaaaagagagtagggagatagggatgtctgaccggttacggtatctaatagtgtgatcaaggtaagtcatgttgaaaagatgaaatttgagtaagacctgaaggagataagcgagttaaccaggtgaatctgtggggaaagagccttctaggataaggaaggacctacagcgaaagccctaagtaggaatgtgcctggtgtgtttgagcaactgtgtagctactcctactgaatgattgttcagttaggtaaactgactgcaatgaagaacaagtgcctgaatgcacatgctgttctgcatggagtactacttcagtagggaagtctggtctcctcagctaaggactgtttatcattcaattttaattaacccatattttgctttggccatgatctgggcatttcagactccatgacagtatacaggttcaattttcaggaggaacttaagcgactggctcaagtttgctctgatgaggtgagctgaactctaagctactgtatacgcatgatgacttcttataagctggctgcattttcatcaatcccaacacactttcctgtcccatacatatatcaaacaatggtgcttttcaaagaagtagtccatgagaaaaagaatgacaaccagagtttatcctactctgcatgttaattactcttcactaagtgatacaattcagagggcatcttatgaaaccccctaacagagcttcgtgtcttctcaatgcagctgctggcagaggactggccatttggagctgagatgtgtaagctggtgcctttcatacagaaagcctctgtgggaatcactgtgctgagtctatgtgctctgagtattgacaggtagaagcttctatttaatccaagtatattctgaatatatactattgttttccatgttacttagaaaataaactgtgcaattcaataaaactaaggtatgccagcttaaaatacaattctatttttatcttcagatatcgagctgttgcttcttggagtagaattaaaggaattggggttccaaaatggacagcagtagaaattgttttgatttgggtggtctctgtggttctggctgtccctgaagccataggttttgatataattacgatggactacaaaggaagttatctgcgaatctgcttgcttcatcccgttcagaagacagctttcatgcaggtaaatttcactttttttattttcctttctgctcttgccttataaatatttagctatttttcccctgttccccactccttgggaaactgttgatttatgactgtccttggcataaattaagagtatagatccaaggactgtggagttaatggtgatcaatgactcaagctgcaagaagctagatcactacttctctaagaatccccttgatctcagtggcatagataaaccaggtccacatgaaagaattgatgtgaatttatagctttctacctaaagccatgttagaagtaaaatgtttggtgccacaaagtgaaaatagcactcaggcaaaagttttctcagcaaggcaatttacttctatagaaggttgtgtctcacaatggagcaatggcgagagcacaccagacaagggaggggaagggggtgttatccctgatgtagctagttcccactgctgcatctttcccctattgggtagggttggaccgcacagtctaagttaattccaattggctattttaaaaagagcaggggtacgagctggagtggtggggtgagtagtttcagcgggaaggacagttacagagcaggtggctaaggatgactaaggtcagagcaggtggctaaggatgactaaggacagagcaggtgactaaggatgactaaggacagagcaggtgatgaaggataactaaggaaagagcaggtgatagaggctaggagggggttgtttactgaaactaggggcaaggagatgtaaagaatgagggagttaaactttaaaatggagaacaaagaacagggaagctgaacacactgacatattggttctttgaagaggaatttactgtatcctacagccccataaggactgacaactactacgtaatctgcacaagatagcccagtagttgtcagaggaatggatggtccagcaaatattcagatagaagtcaccctgatatggatggagtctgaatggcaagactcccctctctctgtctttgatgccaaaaagaaagctgccattgcaagaaacttttcatcctggtcatttattaaagaacatttgattagggaatagaaaaagaatgatgatactcgtttccagaagatagatcctgagtgtaaaaggctcttcccaacagaatgagttaagagacattaatgcaaagggggctggcttaactattcccaatgattattttctattgaatatataaggagactaaataaaactttatgaactgtatatatcatgataagtaaaagaatcaaggacataatgtgaaattgaaaatgaaattgctatttccttgtttcctattagtaaaaagaaaaaaaaagtgctgcctaggttacataatttcctctccaacacagatatatctaaagcaatatgaaaaagataacagagaagaaaaagaataagagatacgacataagtcaaaagcagattttgtctttttgcgaggttagatttatatgttactgagctaaatggttaacctagaccttttcgtatctgttgttcccattaaacaaacttgctaaaaaatgagaacttcatctaaacactaagttatctttacatatttaggtgttatatttcacacaaaaaatactctaaggataagtttcttatgtgaagacaaagcattgaattaccaaatatttcaaattttgcctaactacttaagtttttgtgcatgcttataacacattgtcttagagaactgaaatatttttgggaaaatttgttttatttaacatgactatttatttgttcagtaagtgtggcctgaaagattctgtatgatatatacaaactggatctaatttagaagataatcattccctgatgaatttttttaagtttaacatttgttatataagattttcttacagaggagtattaatcgtaaaaattctctcatccctatagttttacaagacagcaaaagattggtggctattcagtttctatttctgcttgccattggccatcactgcatttttttatacactaatgacctgtgaaatgttgagaaagaaaagtggcatgcagattgctttaaatgatcacctaaagcaggtaagaaaatacaaatatttgataactcgtggttgaatttataattatgaatatgaaaattatgatgatgatgatgataaactaacattattatataccagagcatatttcctttttcttgtttctggtagttttaaatagataaagaatatttttatattatttatttggagatattctatataatctaaaaggatctagggagaatcagaactttttaaagatgaatctctagtcacttcggttccacttcacattaactattccatataaagctcagtgtcctgagtttttacatatgccactgactttttgtagacaatattaaatgtcgttttagaagatagaatgctatgagtaaaatgagccatcttttaagggtcaaactatggatttatttcagagacgggaagtggccaaaaccgtcttttgcctggtccttgtctttgccctctgctggcttccccttcacctcagcaggattctgaagctcactctttataatcagaatgatcccaatagatgtgaacttttgaggtaagaaaggcaaactagaaatggttttgtaaataaatgccactcagaagtgtttccatcgatcttttttataggcagaaagacagactaccatttttctaacccttaggaagtcatggagactcccaatttttatctgaggtcctgttgagagggacagggaagggggggtatgaagaacactgggtacagagagtcagagttgtcaagatgatgagtgagtgccaaggcggaaaatgtcaggtccgattctccaacgcgttttctaaatttcttcttttcagccagcttcagtacttccaaatgagattttattttaaaagagaagaattgggcctgggaaggggaaatggaggaaagtcagtagaaatgctagagttagagggggacacagacagagacaggcagagaatcattgttagcaaagacgagtgataaatttagaaccattgtatattggcattttttttccttacaaaagcacagaagctacaatgactacatgttcagaatagcatatttttcagacacattttgggttattttgttgcagctttctgttggtattggactatattggtatcaacatggcttcactgaattcctgcattaacccaattgctctgtatttggtgagcaaaagattcaaaaactgctttaaggtaagagactatcccaaaataaaaagctctttgtaatatggctcaaatataagctttcaaaactgctaatatatctatccagacagatttagtaaattatcttatagtttcccttttattacatcatggatgatttttttaaatacaacttttgcttgtaaatcactataattgttttttcctataaatcctagtcagccactccctactgcctcagccaatcagttacactcatggaattgttgaccaaaaagtaataaaaattacatgcattgatgtctgataggcatcacataataaaataagggctaaacatgaattaaaggccctgttccctgtttttggtagattctgaacttcgcagctgcaattattattataactaaattagttcctttttcacatggactgtgagaatagcaaggtaaacaaaaaaaaaatagtttaggttttacctctttcttccttttttgtataacagtgatgtgctgttcaatgtgaaatacatataattccttcttcagctgcttgcattttatcatccttctattcattcactccttcaacaatctaacatgaaataaaatatcccctcccctaatgtgaaaatcatccatttgtccatggtatttcactactggaaagctaagaacgtagctcccgcgtaaacactaaggcagcctataacattcttcgcccactcataactcaaattttagagttggaagagaacttccatcaggatcaacaccctcattttataagacataaaacagtggacttctcattttcttttacaaatagaatgaacagaagacaagcagaatgaaaaaatttttatatttaaaaaaacttcaagaaaaaaattgaagaaaactgagatgcttttgtactatataaccttattgtttaccaatattgaaaagagatatgagaatacatggctgaaaaaataggaaagcagtattaaattcattgacatgagaagatatttatgtcactgtcaagtgagaaaaagcaggttaaatcttctcagcaaagtggcttagaataacttgggatgaggtgtttgtgaaagtatctacaaggttatggagtatacatacagtacagtctcagtaaaataattatactcacattctccagcacatgcacatatacatgtgtataatttatttatttcatgtatgtgcaaatatttctgttttcatggggaaaagtcttgaattatatgtttatcaaatattatcaaataaccaagagtaaatatcaattaaaagtggctttctcttgttgagaaattttaactatgtaggtttttttcttctctgcatttttttagttaaaaaattatcatatgctactactgtgattatattcttttaagagggaaaataaaagagcactgaaagaaagggcccaagaactcctaatcatacaaagaaagtcagaaccctggagaggaggaagagttgggaaaggtgactgatgttaacatataatgagttactttgttttgtacagtcatgcttatgctgctggtgccagtcatttgaagaaaaacagtccttggaggaaaagcagtcgtgcttaaagttcaaagctaatgatcacggatatgacaacttccgttccagtaataaatacagctcatcttgaaagaagaactattcactgtatttcattttctttatattggaccgaagtcattaaaacaaaatgaaacatttgccaaaacaaaacaaaaaactatgtatttgcacagcacactattaaaatattaagtgtaattattttaacactcacagctacatatgacattttatgagctgtttacggcatggaaagaaaatcagtgggaattaagaaagcctcgtcgtgaaagcacttaattttttacagttagcacttcaacatagctcttaacaacttccaggatattcacacaacacttaggcttaaaaatgagctcactcagaatttctattctttctaaaaagagatttatttttaaatcaatgggactctgatataaaggaagaataagtcactgtaaaacagaacttttaaatgaagcttaaattactcaatttaaaattttaaaatcctttaaaacaacttttcaattaatattatcacactattatcagattgtaattagatgcaaatgagagagcagtttagttgttgcatttttcggacactggaaacatttaaatgatcaggagggagtaacagaaagagcaaggctgtttttgaaaatcattacactttcactagaagcccaaacctcagcattctgcaatatgtaaccaacatgtcacaaacaagcagcatgtaacagactggcacatgtgccagctgaatttaaaatataatacttttaaaaagaaaattattacatcctttacattcagttaagatcaaacctcacaaagagaaatagaatgtttgaaaggctatcccaaaagacttttttgaatctgtcattcacataccctgtgaagacaatactatctacaattttttcaggattattaaaatcttcttctttcactatcgtagcttaaactctgtttggttttgtcatctgtaaatacttacctacatacactgcatgtagatgattaaatgagggcaggccctgtgctcatagctttacgatggagagatgccagtgacctcataataaagactgtgaactgcctggtgcagtgtccacatgacaaaggggcaggtagcaccctctctcacccatgctgtggttaaaatggtttctagcatatgtataatgctatagttaaaatactatttttcaaaatcatacagattagtacatttaacagctacctgtaaagcttattactaatttttgtattatttttgtaaatagccaatagaaaagtttgcttgacatggtgcttttctttcatctagaggcaaaactgctttttgagaccgtaagaacctcttagctttgtgcgttcctgcctaatttttatatcttctaagcaaagtgccttaggatagcttgggatgagatgtgtgtgaaagtatgtacaagagaaaacggaagagagaggaaatgaggtggggttggaggaaacccatggggacagattcccattcttagcctaacgttcgtcattgcctcgtcacatcaatgcaaaaggtcctgattttgttccagcaaaacacagtgcaatgttctcagagtgactttcgaaataaattgggcccaagagctttaactcggtcttaaaatatgcccaaatttttactttgtttttcttttaataggctgggccacatgttggaaataagctagtaatgttgttttctgtcaatattgaatgtgatggtacagtaaaccaaaacccaacaatgtggccagaaagaaagagcaataataattaattcacacaccatatggattctatttataaatcacccacaaacttgttctttaatttcatcccaatcactttttcagaggcctgttatcatagaagtcattttagactctcaattttaaattaattttgaatcactaatattttcacagtttattaatatatttaatttctatttaaattttagattatttttattaccatgtactgaatttttacatcctgataccttttccttctccatgtcagtatcatgttctctaattatcttgccaaattttgaaactacacacaaaaagcatacttgcattatttataataaaattgcattcagtggctttttaaaaaaatgtttgattcaaaactttaacatactgataagtaagaaacaattataatttctttacatactcaaaaccaagatagaaaaaggtgctatcgttcaacttcaaaacatgtttcctagtattaaggactttaatatagcaacagacaaaattattgttaacatggatgttacagctcaaaagatttataaaagattttaacctattttctcccttattatccactgctaatgtggatgtatgttcaaacaccttttagtattgatagcttacatatggccaaaggaatacagtttatagcaaaacatgggtatgctgtagctaactttataaaagtgtaatataacaatgtaaaaaattatatatctgggaggattttttggttgcctaaagtggctatagttactgattttttattatgtaagcaaaaccaataaaaatttaagtttttttaacaactaccttatttttcactgtacagacactaattcattaaatactaattgattgtttaaaagaaatataaatgtgacaagtggacattatttatgttaaatatacaattatcaagcaagtatgaagttattcaattaaaatgccacatttctggtctctggg

SEQ ID NO: 411 - DNA, 420760 bp, Homo sapiens
agtcctctcgcagctgcgccaggacagccggcgcgcggccgtgcccacaagttgccggcagctgagcgccgcgcctcctcctgctcgcagccccctacgcccacccggcggcggtggccagcgccaggacgcacatcccgcggacaccgaccccagatgtaaagcgggaccccagcccctcgccccccggcgcgatcgacagtctcgccagcgtctcctctgccaaaacccagggctggaagatgtggcagccggccacggagcgcctgcaggtaaggggcacccgggagccgggggccagcctggaggaggaggtgcccgggcagaggaacctagtttttgcttctgcctactttaggggatttgcccaaaaccatcttgtaagacgcatcgatggcaacatgatgctgtcggtttacccagcgccaggaacccggcaggggtatggggatgatgaaattgataaacgcacgggttcaggcgttacaacttttggcttggaggtgcttgtgtgcgtgttggttggtacatataaggttggactttctgactggcaatttagattgcattccactgacacaatgcagtggtctggggttaggatttttgaagccagatttttttttttttttttttttttttgtggtcaccaggaaagacagaacaagtgatatgtgaaagcatccatttgccaatataatgtggaaatatcaagcttggtttggcttggtcatggtatgctacttattttatttttccctattcattggttctctccctttatcttccttaaacccaagctccttcagatatttaagaatcaaaagtaggttcagccaggaatatttatgtcctgggttatcccatcaaaagttttttactgctgtctcctgaaatgccagactgccttgaattggattctggaagctggggatttgcgggaggcgattgaagagaaagagggacctttcccagaagaactccttcagtgacacgttgggccttgggattgccctggttgcaaggtttgaggactgccttttgctggcaaatattgtcaagagtcacggcagctactctgccagataaaatccactgaatcctgcagttaaacttttggcaagctaggagccacattgtttcgtagtaaactttgaagacgtgtttaactggtaaaatacagcaccattggaggctgagtgcatctgaagacttaggacaatgaggccaggccctggctaggttggaggcttctcaatgaacatttacagccccaagcacagtttctcagatgcagggagaggctaacctttgtctaggagtcctcatacagaggaacaacccgcagagggcattgcatttagcagaaacagatgccccacagctcctttccaaagctccctgggccatgatttgcggggagtgtgttcaatttatcagagcctgagacaccagaccagttccccagggtctcaagtagaataaacaagaaaacctgcatttagccttgcagatgaggaggtggatgaccaacctcctaaccccctccttgtcttactaagagaatatcagcactgggctctgaatgactgatagaaggtgatgtaaatatattttggcagtggcaccagataccagtggcgcatttgaagttctccttcggttaaaggcgtaacttctattccaaaggagcagaatgattgaggggagctggcaggtttcctgttcaagtgcagagggtagcttttggaagtccttagagagatgtgaccaaaattccttgaggtggcttttatggcctgatgatctgtacctctgaagagtttgtagatttttgactattcaagttcttcctaccggcctgtttcacttagggaatcctgtgcgctctggagcatgtgacccttggcaggtgggcgctctcgcttgccttcccatagagattgctcctcactagaaatgtctcccccttattttgtgaaatgtgcacgtgtgcattttggcgtgagcctggtttattgcagttggtgtttgcaatgcgtttattttatttcaaggtgtcatgttgaaagaacctgtttttaggcttttgaaagctcatataaacagggcttatcaccaataagaccgagtcactgttggaaggtccttaccaacagggggctcaacttcatgctgcccaaatttcgatgagtctcttttgaaagtacatacatctcaagccttgagattagagaagtgagacaaatgcggaaaaatttttttatatccgtggcttcttcccaaagagtattgcttgactctccttgaaaacacataatttatatgtttttacttttgcctctgagagagctgttgaggatgagatggtgagtgagctgcttatcatattttatttacattccttgtggttatctttgtcacaatctctgtttgctgtctggggttttttccttttcttttcctttcaccgtgatatagaaacatgcctgtccgattcctcagtgagaagccactttgccactcccaggctctgtggccacagagatagcagtggatatcatgctggataggaaacttgagaatgagttctgctctttaatgatgtctgagctccatgtgcctttcacaaatctttataaaccttctcattcgacctcattaatttttttctcatttatctttaatacaaacattctaatttagatgagccagagtgaagaaaattcgtcaaggaaacattcccagaacttcctaataggactaaggagtcaatttattttatcaatacctagaatcaaaagaggggatggaagaaaataaccagaccctttcttgatgatatagttcatattcgatgaagctggtttgagaagtctgtgtcccaggggagtgtgatagatctttgcgtagaacagtcaccctctaaataatggacttttgagtgtagcaactggctccgttgctcaggaaatggcatctttgatcaggtttgattatcattattgttacccacacttctgtgtccccacaaaatgatgctgatattttctgatttgaggtttagctgtttgacccaaatccagcacaggcaaagggacctattgccctgagcagagctgcgctgggtaatttctcattcagtcacacaaaccgaggcaagttcatctgctcccttgaatgttaaaacttctattgcatcccactcgagccctcgctgggagcttctgccattaaaaatataataggatcaaaagggatgtgaagatttaatttaccaccccaactttttacagtgaataaatatgaattcttctcttttcaccttcccgtctgcacagcagactttttttttttcttggaggtattgaggagtgttatacatttttaaagaagcagatttgaaacagactcctttcagaaaagtaaaggagacttttctgaacaaataaaaaccctactggtttttatgaaatagagatgagattacctctggccttgaaattttaaaatttgtatgagtttctggattgacttgatgattgtactgggtggatccctcagaagtaacaaacccatccatgcaagactgtgtcccatccataggaacaagtattttctcagagcaaatgtcttcactgagctaccagatgcattttctggaggccttgataggaggagaaagatgaatcaagactgacttagaaacgaaggaggtcaacacatccttaaaggtctttggtgtagttattactaggatagagtggaatgtgataggcgtatgagttctagcagattctaattgtgaagtttacatgtaaccatcttctcatgaggcattctataaaggttccaatataatcatctagctgtcttcactgagattaccatttctccatggcagattcagaaaaaacagctttttattcacaaagctggatttgagttttgcagcctgggcaattttttctgttccatccattacttcctttttcatcctcgttgtggccaatgtctgtgtactagcacttccacaagagggagaaacacagtgaagagtagggaggaccccagatcctgaaaaagctttcttttggtttcttctgaaacttttggttgatgaagtggttgaagtttccagctaaatactatttggggattttaggagccaaagtcctcctctgaggattatctcaccctttctctgccttgtcctatctggtagatgttgtcttgacttggagtgtggatcgttctagatttttcttctctatgatgatgccactttcacttttcccctgagaagtgagactggagaaccctctaaaacgtcaactggagaccattagccctggcccatcaggcagggtgaaaaccggcaaatctgatacttttccaggctgaccaaattgacaaaaggagcaaggattaagaatgggaagatactagtaacctgcttttgtggtgcaggcactgtgtgtggcactgtgccgaggagctttattttaactatctggctcatttgcatcctgtaaccacttttatccgcattttagagagaaactgaaggccagagagtcgaagtgatttggccagcgttgagcagctagaaatgaactgagctggagtttgaaccagacagtttggttccaatccttacttcttaagcacttcaccatagtgcagaaggataagacaggcacagtgcaatgtacatgttggtgctgttgttattaataaatacagttagagcaatgactgttttgtgggctcagagaggctgctgtcctatttcttgctgaagcagtgggttgaccaaaggctactctgtttttggtggctcaaatctttggtggcacataagctgctgtctcctattgaagttaaaattcacaagtgccattgaagagcttttcagctgaagcacatagcatttatccaaactagagaccttgaaagccggtgattagggtggattgtgtacacattcattccaagtttagacaaaaaaaaaatggggagaaggagggaggaggttggagattttcagagcggttgcttagaaaaaagcaacagctattattacagaggcacaggtttctcactaaacccattctagattttgttgttgttttcatcaattgtagttgagtaagcacaaaacatcgggccctattgttcataaagaaaactaggagttgtcattaatccggggccttagtctccctcaggaataaaatgctatcttacatcattgagtctttctccaagtttgtcagcaaatctctttcaagcgatttgcaaaatcctagcctgggaacaaactctgtgccccttgcttaaccatggcctaatggctgtttcgtgttgactgtactgagttatcttggagtgttaggcaacttttgcattttgtttgatgttccagattaggtccctcccataccaatacccctccacactgaccccattctaccatgaaaattagccttggaggagactctgggagaatcagccttacagcttcaagggtactggagatcaggctgccttctacaaggtattttattctgtgaatagcagcagttcagggacttgttagtggtcaggaaataaaactagtccagaacactcaatgactgcagtgtgcttctttcagccctgtggacacaaatttaaacagaggctttatataagtagagcaagaagaaatagttgagtcgtttgtccaaagacctccttaaagtctagtggaattagtctactgtcattttgtgttcacttaaaaaaaaagttgtgatccctatttagctgctaatcagtgataaagcatcagtgtattcaccaggtccaacccttgaggccaaagactgcaaaaggaaggtgtcagggaaaagacacagacttgttttgtgactggcatatttcaatgcttccagcatcttgacatgctcttccacttaatgctgatgccacgtggatcaataatctggctgaggtcttctttcccatgcctgatggcccaggattcctctgccctcttatgtttcaaccgagttcttactttgataagggaggctccagtaatggccttcttagccaggttgtttcctgaataagaaatcatttgggtaaaaaaaaaataacgaaaaaaaagcatatctgtctctttataaataattttgacacaatcgcttactagcaatgtttcagttttgtaacttctctgagctttgctttccctatctgtaaaatagagagatgtgctttgcagagattttggtatgtagcgtatagtaggtgctcaataaacagaagcacttcttaatgttgttatggttggtcactgtaggaatggagtgttgagtttagatctaagctcctgtcttctcttctgtccatctttcttgtccatctactacgtcccaagtactatgctgggtgtgggtgaagggtgagaagaagggcatagttgtaaacttagaggactcacggtcctattccttattgttcaaagttggacttaatatatatttcctagtatgattgtaactttcagtgtttctgttcatatgaagaagatccctagctagctcagctttataagccagaaccagtatgttaatgacctgctcactgtccacttgtctctgtctcctcacttggggaagctccttttattctcaatgtataggaaagtgcgacgcacagaatgcaattgtctttacagttgggggtgaagatgatggaggttcatatatgatagtgggtgttagggtatgggtgagctgggctgggacttgggggccacataccttgtggcccttgatcacttgggtccctgttttagagaggcctgggtgtgactatcctgaaaatggtctgagttgacatacctcttatatctcctttagtttctgccaggcggtggtctccaggtcaggatgaagtgttagttctctcatgttataaatgtagtaagggaagtcgtgctgaagttgactattgggaaatttcatgtatactactgagttgagagtccactcctccaaaagaaattttagataagtgaagccgttctagaagccatcaaatgcatgtttgctcccaactatccacagctagaaggttatatagcgtggcaagtattctcaaacagggcacagagaaggggtgctgtggtcagggtcccagaagcaacatttccttccactccagcagtgctgctagcagactctcatttaattgggttttattggtgatttttacttttccagccatactcatttccaagtatggagaaaatcaagaaatgtcagctaccattcattgcaggcttatttagtagtagtgtcagtaataataacaatagcagccacctttttcttagtatttactgtgttcccagcactgacctgtcctcccaacagcctttggcagtagagctggggttcatagccagcagactggttgtagggtctgcactcctaagcactgtgcctcttgtgtcatggagcagacattttgttttatatgaaaagcatatttaatccttgagaaaattctaagggacagagattttgttgtctcatttttctggatgatgtaacaattctccagagactacagataacttttgcttgagttcattaactacacatcttccatctcacctttttctctgcagatgaagccccagcttgttcaggcagcagatggtcataccttggcctgagggtgggtgttctagcccagccatgataataatctcatactggtccaaggattgtcagagaccagtttttaaccattgggatatgagaggatatctactaaagatactttaccttcatgaataacaaataaagcttcttggggaaatagccttttcctccttttctgtcttcttgctgtcctgagcatagatgtgatgtctagcattgcagcagccatattgtgattctgcagcaatacatgacaagccttaaaaccagtccactaagaaggctagcatgataagatggaaggacttggatcagtaagcagcacctgaacctacctcctaacaaaagttatatgagaaaaatgtgaccccctttcatttgtttatgcccatatgtgaattgggacttctgttacatgtatctttgacattcctaaccaacacagctactaagggaccaaaattcagattcaaacccaagcctccatatgttattcattgttgaaggttgaattgtgttcccctaaaagatgtgttgaagtcttaacccctggtacctgtgaatgtagctttatttggaaataaggtttgtgcagatgtaagcaagttaagatgaggtcatattgaattagggtgaaccctagagccaatgactaatgtccttataaggagagatttgcagacacagaagcggcacagagaaggccattgtgaagatcaaggcagaaaccggagttatggcatcataagccaaggaatgccaaggattgctggcaaccacctgatgttagaagagtcgaggacatgttcttctccagagcttttggatggtgtgtggccctgccaacctttacattttggacttccagcctccgaaatggtgagagattaaatttctgttgttttaagctacccagtttatggttatttgttacaacagccctaggtagctactacaccagtgaaaccatatagcctcttgactatgtttggtcactctacttctgtgatgtaggtatccccaactttcacatactgcgacacaatgcatgtgtctataaggaatcctttttttaataccgagtgtgagtttatctactgtggattaaaaaaaaaatgaaaacagcaaacaactaagctattgcttctttctcctttatttccttctggtggacaacatcctaggaaaaggcagcaaaccttgagtgtaacatgtgctgtgttgctcagggaaggtcctctggaaaatatggtacatgagcttcaggcctgaagatggttcgctttggagatgaaacttatgggctggaatgtgaaacacagttactttgaggtggacctcagtgaaacttttccagacaggctgagaccaagggaagactagtattaaggattttatcctcaaaacaaactaggttgtcagagtccctgtaggctctctgggtagcagcctctgtgatttgcctcttcctgactaggaaaacctgtaagctgacaaagaagtatatttaaattgacctccaggtgagcctcatggtatgtcaggttgattatttgtacctggtttggtgttttgttttgttttttacttgataactgtataaattattttagtgaagagcctgttcttattctggaactcactttgaagacaaaaaaaaaaaaagtcagccatgtcataatacttattttcttgggcaagcttgtctttttttgatacagccaggaaggcacaaatgtttccagtccctctgagacgaaggcagggagcctgtccaactgcagaactgctctgtcagtgtctctttctgagagtgaagagtcattctggtcttaaaatgctgttttgcttttcattctcttctctagaaggaatatcccctgtgtccatgggagcaggaggggaatggacagttaccaggggaaaggagctgcataattgttagatccatcctaatcctttcatgacaaacctttcctcagagttgctttatagttgtgggtctgagaataaattcacagattcacccactgcatgctttgatggtttcacgtcaggaatgggcctacttttcctcaggtgagagcggaatcctgctgtacaagccacctgtaatgtgggcagtggcaactgctgtttcctttccaagtcttctgaggttgtttcctagtaagtgagctggaggctatggggcctggtcctggtggtagctattttgcttttggacataaaatcttggtagcttaatgtatttgttcctagggctgcaatagcaaagtaccacaaaccgggtggtactggtactgtgggttgtcccgcagttctggagactggaagtctgaaatcagatgctggcagggttaatttgtcctgagggctgtgagggagacacagctcctggctttctcctagctgctggtagtttactggcaacctttggcattccttagcttgtggcatcatcactccagtattcatgtgatattcttcctgtgtgtgtgtctctatgtcaagatttcccctgtttataagaaaaccagtcatattgggttagtggttgagcccaccttactgaccaaataaagtcacatgtcgaggtactacgggttaggatttcaacatgtacattttagagggacacaatttaatctataatagtgtggaattttcttttgggtatctaccagtcaccaagatatttatccctacttgaccagccaccaaaaaaaaaaaaaaaaaaaaaatggcaatcagaattttctctacatctgctccatgtcatgtctactactttcttgattgtaaaaaattacaaaataatgtctgcttagggtagcaaatcagtcagtttagaagtatgtaaagaagttagtaattttgtgccttttccaattcccaattctacccatgaaggaaacccatggtttccttctatctagtggttatttttccacatactttccccaggcttttgcaagtgtatacatatgtgtaaacacatgtttaatttttctcatgaatttcaattatatatatgtatatatatacacacacacacatgcacatatatatacatatatacatatatatatatatatgcaactttttaaaaaattctactttactgtgttttgtgggtatcttttctggtcaatatatgtagacccaactcattccttttagcacctgtgtagaattttgtggtgaagctggactataatttatttactcattcccccattccctcttgagggagtatttaggttgtgttcatgttctgttttttttccctataaataatactgctataaatttttgtgtctatcctgacctactggtgcctgtatttctttaggctgaactgccaaaattgatatggctgagtcagagtatacatgttttaaatttcagcagctgtcaatgagggcttttattgagagttatgctttttgatcagaaatatatattattttgacaaaggtgcagagaagatagttcactagtgtcttagtctgcttgggggctgctgtaacaaattccttagactgagtagcttagaaactacagacattagtttctcatggttcttaaagctgtaagtccaagataaagatgccagcagattcagtgtctggggaaggcctgtttctgattcatagaaatggtgccttcacgctgtgtcctcacataaggtaagggctggatgagctctcttaggcctattttgtaagggcactaatcccattcatgaaggctacactcctatgacctccccaaaggtttcatctcctcataccattaccttgggcattaggattctaacatatgagtctagaccatagcgactgaagaaaggataatagtgttttcaacaaatgatgctggaacaattggatattcatatacaaaatgacagtgaaaacatcaacaaacccagatacttcaatccattcatcatgccatttacaaaaattaactcaaaatgggtcataaatctaaatataaaacctaaagttataaaacttctggacaaaaacagcagaaaatctttgtgcctttgtgtgtatctgtgtaaacattactgcaatcaagatgatgaacatattcattacatcccagagtttctctgggttgggcagagattccttagaacaatgacaaaaatgcaatcaacaaagaaaaaattggactttatcaaaattaaaaacttctgccctttaaaagatatggataaaagaatgaaaaggtaagattcaggctgggagaaaatacttgcatctcatgtatatattaaaggatttagatctaggataaataaactgtcaaaactgaataataagaaagagaatccaatttttaaaaaccaggaaaagatttgaactaagaaggtctatacctggcctgaaaagatgttcaatgtcattagtcattaggtaaatgtgaattaaaatcataatgaggtatcactacacagttattagaactactgaaaaaaaaaaaaaaactacgaccttgctaactgttgatgagaatgtggaaaaacaggaactttcatacgctactggtgggaaggtaaaatgatttattcagatcagtagttacctgaggatggacttggagggaggggcctgaaaggggattggggtaagttttggggttgacggatttgttcaacatcttttttttttttttttttttttgagacggagtctcgctttgtcgcccaggctggagtgcagtggcgccatctcagctcactgcaagctccgcctcctgggttcacgccgttctcctgcctcagcctcccgagtagctgggactacaggcgcccgccactacgtaggcccggctaattttttgtatttttagtagagacggggtttcaccgtgttagccaggatcaacatcttgattatgtgatggattcatgggtttatacatacattgaaaacaaatcaaattgtgcagcttattatctgtcaactatatctatacagagctgttaaaaatgtgtatgtgaaatcctcattatttgccaggcatagtgctagatgttgggagaactaaacaatacactgtttctgttctcactcctgagaatttttcatttcctttttactggaaataaaaattctaacccagaatataaataatgaactctataatttttcttggcgttctcttcttttaaaacatttcttcatttagttcttgaaatgacatttttcatccatctcagtttgcctagggatcttagtcaaactagtggttgagcaagagaacaaatccagaccaaagggtggaaagttcacgttgccttgttgattcttcctcattctggatggccctgtttctcgttcatgctcctagttcatgcatttttctcctgtttctagcatgttggtgttccagctgactctcccatctggctcagtcctctgagaccttttccagccctgtatcacagtgcctggctccagcctccatggccagtagactcaggagatattgctgttgaaagggtaaatttctgggatgtggcccctatgactggctgggctgccttcttgttatttttcctcccgtgacagaaagcaaagagcaaatccatcatgcaaaaccattagtgggtcttgattctagtttgtggattaaagtaatgtgtgtagcagacgtagggtctggattccttgtgaggcaattgtttttctcaggaatatggcaactgaaaactagacaggatggaataacttcactagtggcaactgaccctcagtaaaaagctaatgagaaacattcacaaaatgactttaacctagtagtttaaaaacattttgcccctcaaggaggaaaatttgagacattcaactcaacctcctttaaggtcaagggtaaggaatataagactttgttcaataaataggtaaggaaacgatgtggcatattgtccagtctggggctctgtcgaggtgatgaatgcattgtaaattaaactggaacagcaggcataaaccgagaatcccctgtcaacctgtacgtgtggttatcctgagacagcaagtaaactactgtacttctgcttctaactctattttgagggtgaaggaaagaaatgaaatacattgaagtgagggacatcacgtggacaggaaagccaggaagaggggacaggagagtcggaggggcaaaggatgtgcacacaaagaaagagagagaaatggtaggctagaggaagtcacacgagcagttagcactgtccctggcacatgaatgctccaccataattatctataagatatggaatgcagtggttggatactaatacattattacttggagccaagacatcacatgctcaccctgctcaggtgttgaatgctttggtggattatctgactcagttggaaaaacaatgccctttagaggaagagcttggacactttgagggatcataaaagcagatctaaagccacaggggtgagcagtttgggggaaatggggataatgagaatatttctttagattacaagtcagaccacttgtaacccattcagactgttaaacagtggaaagaccatgggtttttaaattaggcacccatagttacaaatcttggctgcttcacttattaggagttatttcagagcctctgatatgtattttgtgtttgtattttctcaacttaaaaataaggataatattataacacttagctcctggttgccgtgaatgttaattgagatatggactacaaagagcgtagcttagtatccggcacatctttgggagtcagataaatactaatatcttcccctatttcagatccaagggtaccctaggaataaaagcatagaactttacagccatgtgaataatagaggtttgctgtttcccaaagtgtgtcccatgaattcagtgtgttgctcataagtcttgccacagaagtttcagtctttaaataatttggggaagccttagatgaaacaaagtcaggctgattacttagtgcaagacttcttgtagcatttaagatgccagtgccctgggagtttccaagtgaaggaagaagacagctttagctcctttgtaaagaagcattccattgtccagggtgcttcaatacttgaactcctttaggttgacaaactgtgggcctgaggtttggctttagcttgcagaaatatttccttcggctccttcaatatataaaatctttacaaattcatttccagggttcgaaaattagaggaatttataagaaaatctggacttcttaattcttttgaaaaacgtcagatcacggagggcttgaattttcaaatagcgaccactgagcagctgctgttccatctggatggaatgtggcctccagctggttctgagctttccttggtgcatctcactgagtcacccagcttgctgagccctgtggatacttgaattggggacaccaatgtagttcagctccttcatttggccaatgtaaaagctgcctctcaagttcaccttgtgttggaaacagaaccaggtccttggtcttctgactcttaaaggccaaggtggtaactgattttacttgtttagcaccattcattgctctccaagtacagctctcgcagcccacctgcaggtgcatggaggccaacttctgtcccctctattttgagagctgtgcgatggagttttcatgattggagtggggagccatggtcattgcttgtctcctgggtaaaccaaggcatagaaactagaagtgttggggcttatcctattttctaatccagagcatctgggaggggttccaggcacaagtgggaggcttcttctacttttaactaaatgcagatccctgtttcctacatatcccacgccaggcaactaaaacttctcattgttatgatattggattattttggggaattttactgccaaacattggaagagattacttccaaaaatggaggacatgtagagggtggagaataattttttaatttaatggatttcaacatattcctcacagattatcagccaatggaagacccattcaaatgccatttcagaaaacccaaactgaaaaacatccataatggtggtaatacctctctatttagagaatctccgttcccaccaaaaaacactcaaaagcactttgcagacattttactggtcatcttgggagcaaacttactgctgctttcatttactttgctgagtgtggaacccatctgcttaacgctacccatttcctgcagttacaggattctgatgatttttagcataaacatacttggaatcgactcacacagtggcttgagctatagaacaatgaattagatctcccaccctcaacccatctacttgattcatgaaagcacggatgctgtgtgcattccagtccctgagatatccatcatccatctgagttggatgaggctattatagacttgagacagttgtctattgctctccatttgacccccttcccgtaaaaagtgaactctattgataactatttgaaaaaatattgcacactctaatcacattgagatttagtgtgcatactctctctcctcgaatctgtttttcctgtagcaccttttaaacccagaaattcatctgaaatagtttctgctgcagaagcttattatttctgcagtagcagaaaatgaaagggatggtgctgcccacagaatataaaagtcctggccaaactacaaactcagaaaatacaaatatacattagacccctatatagttctgaaaaggttggcttttggttagtaagggaaaacaattcacatgcttttgaagtacttgtcaataaaagagaaacatatcatttaaacattaaaacataccatttaaacataaaaccccttgaacaccagtcatataatgaaaggaggaatttagttgtgcctgaaaacctagactagaattataaccaaggtcataactcggcctaaaacttttaggtctgagcttcctagcagcccgaggaaaaagagaaacatgattagttacttaaccttcatggcctaatagaagaatgtatattggctcatctggagccctgacgtttttctaacttgaaggccctggaatttatcatgtggttctttatatgggacattgtaacgcagacttgggtaatagcattagttgtagtttttgccaaagttgtccctagaagttgaaaaaataaacagttcaataggaatgctaagactgtttatgtagaagcagaagtggacatctgtgttttgtttttgtttttgtttttttgttcagcttcatttcccatcttctggtaacaataccctgattttgctttggggaactattctatccctcttcagtagggagactccattcaattttggaggtttttttgttgttgttgttcgtaatgaatgtgccattctttagccacggggactatgtgtgacccaaactagattgattagacactttctcccgggagttggaatcctcagcagggtgacaaaaagacaaagtagtcatagctgacaatgctggcaaccatttccgaagaaggtctgtcgtcctgctgcccagaccctggtagtggctctatccctctcctttctgagctgtatcctctccctctcctttcaattcagtgttactccaatattttttctttctgcttaagtcagccagagttggtgtctgttgcttgcaaccatagaactgaatgatatacaggtaacatttcccttgaaccaattgatgttcagtcttcaaattctgtttcacaaaaggtgatatgtggggcagagcatatgtctggggaaaagtgaaggagccatgcttgaaagctctgtaaaataccagaaacctatggacgcacagtgtccttgtatatgggtacccttccgtgtaaaaactgtgcatgcttaactgggagatggagaaagggtgcaatttttttttttttttttttgcttggaatttcttttaagcacatacccttactttattaagtgactttgaatgaagataatcctcattttaccgtagtactggcccacagcttccaggttctggcccatctttggagaaaggttttttggtccttgttgtttataagggtgtagtcctgctattggcatctcctataaatcttaagatttttataacttggatgtcactctcaccttcctgccaaattgctgcactgaaaaagcagagtgtcattttaagtaatgatgcttttactgcatccaaaacaaataaagtaattttggtacacattatgaaacaaatccctcttatctctgagcctagagtggaaatagtgtcagggatgcaaatagctgctttggccaaaatagtcaaagaagacatggccttagtctgtctgagcttcatttcttaagaaacatttgtagttgttggttaaaaatgtgaatggctctgtaagttcactctaggacaatgtggattctttagcccagaaagttaaatacctccaactttggcagtcctgaccttctgggtagagaatatagttccccagttttcaagacctgctttgctactttgatttaacacaaggcagaaatcttcaaaacaaagccctctggatccaggaaagttcatctggcattagttagcttggcaccccctacccccttccccacccacctccttgtcttttctctaggaacttgatgctttgtaggaaatgaatggctttgcaaaagtgcaaatttggggaagtgttgtgcaaccaaagaaattcaaattagtattccccttgtgggaatcttcttggagaaattatattaaaatattcaggtatagagtacagccaatatctgttttaggaagttgacagactgagtgatacagctcaggggttttctggaagtaaggcaggctagggaaagaagaatacagagtttaaaaaacctactaatttatgtctcctctctactctgttaatggtaaatagctcaagctcaatgctgatctctttactccttgacccagacaattggcatttttcttcataatgtaattcaatgcccttgctgaacaggagctggcccatgagatatgtatttgctctgcactggaaaggatgtgtgctggcacgtcctaggagtaggcaagcagttgatgaaacttagagggagtcttttggaaatcaaaattaatttgcatttacagggatcccaactttgcaagtaaggtggaattgctctgttatttgtgaccacatctgtgttttctgcccccaaattaaaaacacaaaaacaaaaacaactttcttcctttcttgcttctctcttcctcctttccctataattaatgggagtgaagttctttccattcctgatttctttgaactctcttgctaactgctgagccttttagacacttttttatggctttcccaaggggccatcaccacctctcctttcttccatcttcctttttcagtggctgtaagctcttggtgggctggaagacacaaatgaattggacaaaaacaaatttggctgttgcttcaaagccattgcattctttgtgtgtttttttttctttcttttttttaagcttttctttttttttttttttttttagcttatggttaagagggcattatctttgcattagatggccatcaaaacttatttattgggttatagatgaagagaacgaatggacttatttcgatccaaggactggaagaaatggacatattgttgatttcttgtaaaatgcactgaatgtctacctcagaactttagcagatgcctgcttctgctaatttaaggaactgatgctatttgtctttttaattttacataggaaatttaattttgatttgaagcttttaatgcctaatggtaaatatgaaaatgtgtgatagagcaaattatttttcatctcttgcatttcttcgtgtatctcacactcaggggaatttttatgtagcataacgatttcataagtgttaacatttaagaaaattttcacattataaatatgagcagaagcctgctttagaaattggaaaccaagtttggccaaaatgaaaggcaaagtcatggctatgttaaaactcacatcttggggagttctgggtggtatactgacagtggaatagactcagatacagtgcttttagtattgattagtaattcttgaccaacggatcttggaactcaagagggccatggaattacttccaggccactgttaactttctgtgcattctacatttcctatacactgaaaaaaaaaaaaatacagtaccttgcaaatatttcaattacttttcaaatcttgtgtgctttattaaaagaaatacttatttgaaatcattattgattcacagtggcttttggactttaagtgcattttcagtccttgagcatcaaagtactatgtgtgggtcggcaacattttggatgtaaaaaggatggtgatacttgaaagatttgggcactcttgaattgattgatggagattactgtagggtaaaagtgcactgactgtgatttggatttgtcacagtgcttctcctcgtgttaatttcccatagtctttactttcagcaaatgttgactgatcttttgtttttgagtgaggagccaaactgagttttaaggtgggtataaagaagaggtccctgtgctcaagaaggtttcaatcagttaaatgccgggtagatccatgttactacaggggaaacttccatcctaagacgctgtaaagggcaaagatgagggtcttcatcatcattgggtttttattaggtaaacaaaagcttcccctcgagtcctacccagaaggatactaacacctcagggatgagaactgtgacatgtgcccaaatatttgcttgggaaagaaaatattttaactgggcacttttttgcccccaaccaaatcggagttctgtcaataaggaaaacgagaaaattggcagcatcataccagccacctctaccacaggtgctgagtttaaaataatggcagatgtggaagatgcgatatccccagatgctgtgaacttttttatttgccgtagaacctttgtgcttttttcctgtggtttggtgcaataatgctgaaagcaacacagtcctctgatttgaacagtcagttgatactgggtctgatatggtatcagatggttttctagcccatctttaaataaaagcattttgtccaatggcatgtgttgaaaactgccaagagtcctaagaaagaaagactcttttttgtgattaaaaaaattgcatctgagtactcagaagttgggaatttttatgtttgtttggacagatgctgtttggataattttctatttgggaaaatatcatttggtttataccttcttttccttttatttcatttttctgcagtctttttcacattggatgtgagcagattgtagggaacaaagccaaattaactcaaatatcagtgattaggtgaaacaatttcccttcactttctgtagttagtgtttataaaaaagtgcctttatcggatgctaaggagttgctttgatgctttggttcaagctcttaaaccatcttcttcatctctctctacatccttccatacattccagaccatcttccacagttgtgtgttttgatgtttgatgcttttgctaatgttgtttcgtaactttgaaatatccttttctgtcagccgcctgctctgcctgggggatcatactcctgtcagccgcctgccctgcccaggggatcatactcctgtcagccacctgccctgcctgggggatcatactcctgtcatagcagttgaagttgcccctcttctgccaaagtctttcctggtatccagttgcaatgagtcatccctttcttctgggtgtccacagtttgttcttctgcttcagttataccattcagctcattcttgtttttctttttattggaattatgtgtggacttctatcttccaaaagcctagaagctgagggctgggtctttgttcatctttgtgtgccccattgcacatggaataatacttggaatacaaggccggcaacaccatacaagctcagtgaatatatttatgtcatgcttcaataaactaatgatattttataatttattttttgtcatctctcttaatttctgtggatggaaaggtaagagatagagtggcataatgagcatgctaagagaagaattttacttttgtgttgagagaggtatttttcttacatttatctttagagccacatgttaatgggggaaaatgcacaattctatgtgtttatattaaacttttttgaaatgtgttctggattttcttgacatttaaataaagatattatacattgcagatagcttgtacccaagttatttctacttactattagggacattccctttgttatatttaatttcaggaatgcaagagatggcaatagttggagctattcataaatggcaattaattaaaaatataaaacatagaatctgtcttgttcagagttgcatctgttttctggtgggctttcagatgggggagaaagttttaggttgcttttccttgtgtaaaacaaagtgagctccatttgagcatcatcaagaaagccagaggtctctaagattcctaaacacattatctgttgttgtagaaagcaaggaagtgctcagaaaaaaaaagttatttcaacatgacacagaaggccccttggctttcattggacaaatttagtacacctcaaaataaataacagcttttgaggattttagcactttaaaaaaaaataagtctatgagttcatactaatataaactgatttaaacaaaggaataagcaaacaaataaatagataagaaaggtaagctcttccttacaataaaatgttacctaataaataaagcagggatgatggagttagaaaatcaccattttcaatcatcataataatatttaatccaggcaagaatcattagtgattataaaactagtgtgtgaatgttttatgtgggacaggttatttatagaatctcaaagtatctcaccagacactatcagttgactacaggaaaatgctaactttccactggaaaagtccaatggaagaaattaacttagacaaagaatcaaagttagcatcacccataatgaggcaaaccatgatcgtctgcctcctgatacaacgcactgagaaggctcactcgcatcatattcctgttccaggagcatgtattctctaaaacaactgtctcaggctcttcaaaaatatcagtaccatgaaagagaaaaaaaggctaagaaactggtccagattgagtagacatgacaacccagtgcagtacatgatcttgaatttgatcctggaccaggaaaaacattagtataaatgacttcactgagttagttggtgacataattttactatggttaggcaagagaatgttcttgttcttaggaaatatatactgatatatttagggatgaaggggaaatagcgtctgtatcttactctcaaatgcatgtgggtaaagggaggaaaaaggtaaggaaagggaagagagagaaggaaggatgaggaggatgagaaggaagaggagtagtaagagaaggaggtgggagaaagtgaataagtgagaatgacaatatataataaagcaaatgtgataaagtgttggtggttggtagatctgataaagctgtcttattcttgctgtgttttggtatgttggaggttatttccaagtaaactgttaaagaagaagacattatgcatgcgtgttcataaatgtcacttctagttgttttagggagtggtggtcactgaagtgtctgtgcctaaaggcaggggctgttctccagtgcagagcctagtatccggcaaaagtaggtagtttctaaatatcttttggatgtttgcatggaccccaaggccctgaattccctcgagctgtaaaatatttatcttccaaccattgcaaatgccaattgtaaagaaatattttgctatttccaagttcgcttgcactagttatgagatgttttgctatttccaagttcacttgcgctagtcctacagcaatttagttgtagttggtgggacataagcagggatatcttacaggcaggatgcatgcatctctgcactcttcttcctgtaatctggcaggaatataaatgtgatggtcatttgagaggcccttttaagccatgtgagaggagccatgtgctaagaactgtagaacataaagatgtgtgagttctggagctttcatactagccttgggcctctcactccaggctttgtttctgtgtgagagatggaaatgtctatgtcctttaaaccaatgttcttttgctttatctttcatttgcagctgaagctaatcctcaatgatacaccgtgctttctagaaatcatcattgttaaatttttgctcctctatggagctttgtattcagtttgccccatatgcacattaatgatagaagttttctggttttatttatattccctttctgttttccctgagtagaatttttcttattgtgatgtggattctgtttctgtacttgagttggtgggtcattgtctgtggctttggttatttttactgctgaggctaccttactttttttccatcatgataaaccttctccattttgcaaattgctaaattggtctgaaaagattgtgagaactggctttcttaggcgacttcttgtgctgaccaacccagctggagaccggatgtgcagaggtaagcacttggaataatcagaaaataggaaattttaactattcccagttgccagagacattttgcttcagttgaaggattggaggcaggtttttataatgctggccttgcctagtgagttttgttgagcaaatctttgtactttttggaatccactcatgtttttatttgttccgtggatggttcttcctctgcaactatttattgccactaaagtttgcggcacagtcagtcccacagataataaatgggtgtgtgtgcccacagctcaacatgaatagagtgactgacttccagcttgtttattgttagacgggtatgtaaccaaggaagcctaactcttcaattatgtgtatgtgtgtttctgtgtagtgaaatatgggcctgaaaatggaccttgcagggatattgcatgatattccattatttcctttacagcaattatttttcaaatgttacgtgaatgaggatggtatttacttgcataatttcatagttatgttatttcatgacctgaatgccagcagctccgcagtttgaagcatcatttccttctggtaggctggctgtattggctccctggctaatatgaatttgaaagataattgataattacctaaatgtaaagcattgcatttggaactgctgtgggtgaggtcttccaactttttaaactctaactagcctagacaggaatcagcgattgctattatatgcaaattctgtttttatttctacagaaaagagaagaaataactcttatttgttcaggtttaccaaagaagtacctgtcacaatttggtctgcaaaatgaaacaaacagagcacgaaaaacagcccaacaaccaacgaaactacagccaaaatgaaggatgcaggataaaacatgacttaaacattcccttggcctaagtgaacgtggtataatgggaacagggtagaactaggaattgggaaattttcagggaagttttagccctactaagtactgtctttataactttgggcaagttacacaaacttctgagcctcaatttccccattcagcaaaatgagtctaataaaatctacctcattagcttcttctgagtgtgaaatgagataatatatgtaaaaatgtttcataaactataaaatacgttcaagtattttttatcagtctgctgataaaaggtgtggcatagctgccccagacccccagtgctaattgtcttggtaagcagcactgtaatttgcactctaagtaatagtaagtgttaagaatttgtaagaatttttaatgtaatgtgcacaaatctattctgattaaaacaagtagcatcttcataccttcaggattataattgttgttagtaaaggctgatgagagggaaggaaagtaggcaaggcaatacaagttgcctttttcacttgaacttgggaatgaggagtaagaagcacttgagcttatatccaccactgcatcttttaccaggaggcttggagtgttacaagaagcatcattttcatcttggccttgtttgggagtagggaggcacatggccaagagacaagctttatgaagtcatgtgctccaaagggaacacaggaaaaagggagtgcaagagacttagtcatgcagaagagtttcacacaacaggtgggcttttaagagtgttgtcaaggagaagatgcaaatgccttaattagtttggacagctcttttaagtgtaaagaaaaacatgtctactggtggagatgggctttgcaacacaacagacctgtgtgtgcgattttgatcttaggcaactgaaaagcaagtaacgctccctttctattacctgaagcttctgcttatggagttttgaagttctccaggatggtttttctatttctctgagcactgaagtggctaatgccatggcagatgtcatacctaatgctgcagaggcagagcataaggtagggaggattttgtaggaaccttctgatgggaatccagagagcaaagcctgggacatgaagctctcaataaggaaatgggaaaggaagagtccatggttttacttttaacaaagtagggaattgcttttgcagattagataatatgtgaggattgtggcaatagaagaggtatcttgtgtttgtaataaatgcattatttggggggttacaaaataaaatcccaaaagaggagaagataattaactttcttatgagaggttacctaattttgactgagttgaaaggaagaaaaattaaaggattttaaaggattgaatctctctttctgtctcatttgctttctctctttttaaaatgaaatggttggcagagttggaattttggaaaatagggtcatgaatatttgttgatgaaaacagtcatgcttagtagctttgaggggactccctatagacagacttgattcctagttctagttttcacagctggttgcagttgtttggatgacgataagaatcagggatacttggttctgtatttggaaaaaatgaaaccagactgcttaaaaatttgactggaaaaaggctactgggtatggggttcttttggactatgctgactgcttaacaagggatcctggtttgtcttgtgtcacattaaaatcccatgtctcattgaaatagtggttaaatgaggttgcatgagttttcagttgagaactaaaaaataacatattttgtttacataatgctagtttttgctttattcttatgtttatattagaaatgagtaatttagtcccagagaaattacacgtggggctttctgccaagacccagtgccaaacatgagttttgtgattaaagtatccaatattaacctttgcttgacaaaaaccaagataagatgattttttaaaaaaacttagatgatctgaaaagaaagcattataacaaaaatgtatgagctaggaaaagctgagagttactaaattgggctttgaatggtgtagatgtaactttgtgtaaaaatacatgagtttcatttctcttggtattggaggaatacagataaagatgattgagattaatactaagcctccttatttattgttttatttgattagttcccttgggtggtgggatttactgtgaggcagatactttgtttcattcttgtttttcatctttgggcttcatattcaaatgccacgtacctgtagaatgttagctacagaaaatttttttaaaggtgatattcatttattaattcaacaaatgtttcttgagcacctactctgagccaggtactataccaggcattgtcattgtcttctgggagtgcgcagtcttgaggacgcaatagacctatggataagtaattacagtacagcagaatcagtgctataataaaagcagagtggggaattataaaccttgccctagaaaggaacccttcacaaagaagacgatgtaacctgtttaaggattgatatggtttggctctgtccccacccaaatctcatcttgaattgtaactcccacaattcccatgtgtggtaggaggaacctagtgggaagtaattgaatcatgggagtgagtctttcccatgctgttctcatgatagtgaataaatctcacgagatctgatggctttaaaaatggtactttccctgcataagctctctctgcctgctgccatccatgtaagatgtgacttgcttctccttgccttccaccatgattgtgaggcctccccagccatgtggaactgttagtccattaaacctctttcttttgtacattgcccagtcttgggtatatctttatcagcaacgtgagaatggactaatataaggatgaataggcatttggtaggtagagaagattaccctaggcatagggaagaatcttcacagagctgtgaactcaggctgttccagacaagagtgagcacatcacatgaggctgaagggttggagaaggactagagtgaaagagtatggaagcacaactgggctatagcacaacattttataggatgttactgagcatggacttcattttctaggcactgggaaactattgggagcttataggtaacaaatgactcagattggttttaagatgattctgttggtggtatagaaaatgtattgcaagcagggaaatgttttaaggaggctgttggaaatggtacaggcaaaaggggatgaagatgtcatctaaagcagtgactttggggttgaggaggtggcagaggttttgagtgagggtgaagaggcagaatgggttgacagctgattagagaggacgggaaatgtagaggagagtcctgaggttcctagtgtaggcagctgagtggagcatgaggccagatatggagtcagccagttttaccagtcgaagcagcatatttcaggtggcagtgggatagggtgggtgtagaatcacgggtttttcttttggacctataactaagctatattttagcttgtggacatgcagttcttattatatggagtgagctgagtcatagcaagtgctgtgagttttgattttagctggcctctaattaggcagaacaggaaaactctattttagttgttggattaaatatttttccacctcatgatctagaggtagaggtctctgactttaaaaatagctatttactagccaggcatggtggctcccacctgtaatctcagctacttggaaggccaaggccagaggatcatttgagtttcaggagcttgagaaaagcctgggtgaaataatgatgtagtgagatcccatctcaaaaacaaaaacaaaaacaaaaacaaaaacaaaaacactgatttactgagtgatagctctgtacctgatgctgtgcttaagaggtactgtgttactagttactagttactagtattttacaagggagaaaaagggtacttatagaggtttatgaatttgtcaaaagtggtgaagatgggagcaagacagttctgtattatatgtaagcattttgttatatgtgagttttgaaaaaaggtaacttttgtaagaaagcaggtgaaaaaatgaaaagattctattttaacttcagcagagaagtggttaggtgctttgcttcttatttggtgatctaggttgattattataacttttctgaccatatgggggaaaataaagcttgatttacaatgctgagaatttgtactacctaataactcactaacttttcaggaaaggatatagtttgagtagctttcagaattataaagaaagaattggacctcttaaaaacctgtgctctcataaagaatactttttcattctgttttatttgtgcaacaatcagatttctgtggctaggttaatagtgttttataggcttttctgggtaaaataaatttttctgttggactgagggcaaaatggaaacagacctagcctaccaaactgtaaaagtcaagcctccacatgttaaaggtgattagccagtaatttaactgctttttaaaacacaaatcaatagtcctgttattgcagaatgagaacagaatacagagtcctaaaatgtgtcatccactatggtcagtgtaaactaaaaaaattctggcaggaaaatgaaacataaacaagagaaaaaggagtcaataaaaatagaccctaagaagacacagctgtgggaatagcaaatgctttaaaacagctactattaatttgttagaggaactaaggattttgtcataaggagtgaacaaatggaaaatctcaaatgagtaatgaaaagtttacaaaagggccagatagaaactctggaattgaaaagtaaaatatctaaaatagaaaattttgcaatatgggcctgacagcaaattgaagaagaaagaagaaaaggccagtgaatgtgaaaatggatcaatagatattactccagttgaacaatgtagaagaaataaaaagaattaacagagccccatatgggacacatcaagcaatataagatacatgtgattgcagtcccagaaagagacaagaaaaagactggcacatgaaacaatattttaacaaataatggataaaaatttcccaaatttggtgaaaaatattaacttgattcaagaacctttgcaaaccataagtgggagacatctaaagaaaactacacttttgttttttaggcaaatcatagtcaaaatgctgaaagtcaaagcaatgaggtaatcatgacaacagtgagaaaaacagtccattatatacacagcaatgatgaatattcactaacttatcagaaataatggaaaggaggaggcaatgggaatgacttgttttaagtggtgaaagaaaagagcaatctgtcaacccagaactctatatccaggagagatacaccatggacatgaaaacaagatgttttgcttacttggtttgggaacctctgagttacacaaagctaagtagatttctgtactgtatgacttctcagtaatagagaagttctaagaagaggatgtcacattcactgatatccaagttttttttttgaccataaatcctttattcacagaatgtctcaggggattcattttatttgtaaaacacgtctggaaatactaagcttcgggaatggaatttgatatttattcttcatttttattttcatgatattgccaggatgaagtgattttggaaaataattagcaatgtatctgtttgcatctgtaataatgaaaatgtgacgttttacctacattgacttttctttcttctaataacactttcagagttgaatggctttgggctgttgccaggtgacatactttccagcaggcctaatggttcagtcttgccttgttggactatttagatatagatgaaaatagaactcccacctagagttttcaatgcatattttatgagtataatagtgccaggaatataggttgaattggattacaataaaatcattatcttttacgcctctgtcttgtgagtatttatgtgtactcttacatgtagtttatacatgagtgttacaaattaatgctaccaaaagcaagttgtaaaagtagtccagaattacattgtaaatgacttaagccatctaattaaaataaaatttcaatgtcttgaaataattcagtgaaggattagtgacttaaatttcatcgctgctctgaacatgaccttctctttgaatatattagaaaatggagcttaagagatcatcatttaaaaggtttattgtgaaatttttttctttccatcccctattcctaaatctagtcataaccccctagatgtctaacatatttcctttccacagcagagtttgaaatctctacatagccaacattgaggctctcaggctcccaccgcattagtgttgattgacacggggggttcggctttgtcttcttgtctgtggctgtaaagggcaaggtgggcattcctctctctgtgtttttcccttactcgtttcctccaggaatttgtgagtctcagtctcttttccctctcaaccaaaggcttccaaccaatgactataaacttcttctacagcagtggttctctaattggtcctcagttcttcagcatctgtcacttggaaacttgtaataaatgcaaattcttggcccctcccgctagcttactaaatctgaaactctgggagtgcagcccagcaatctgtgctttaacaagctttcccagagattctgaggctctatgaagtttgagaacttgttctctatagtaagaaaaaacttaaatcatttttttctcatccttttggttatttgacaacaaaggtaaagcagaatctaagagttcttggtggtgatagtagcggggtgttgaataaaccacttttcaaattaagtgatgtattttaaatagtaacaataattagtggtaatatctttacaatattcttgaggtcattactaatgctattgctgtgttactgtgaggaaacaggtttaggaaagaaggtagccaaagtcaaggtgtttagtagtggagccttgatgatgatgctggtttgaccaatactagcacccatgctgcagcccacttggtaatgctctctgagatgcctggtaatgcctgtctcctcttatccctgcccatgtcttccctgtgaggccagagacttactcgtttctttttaaaaatgcaagaggtggagtgaaagttcgtgtctttgtagattaactctggcctttcttactcatttgtagactatcccacctcccaaactagtagccaaagctaccttgatcaaggagagggaatgctgtactttattcgtaaggcaaacaaatgtttatggcctcttttcttataagtactgtacgctaatcgattgcgctgctagagccactatggcctcttttctttcaaaagtttctctctttctggaagtagtgaattcactgaccaatttatctttgggctctggcctgcggtttttgaaactttccaagatcaactgagcgatgatatggtttggcattttaaactgcgaatatagtataaagttggatgattttgagagcaattcatgctcgaatgaagtctttatcccactgagttatggtctccaacccaacccctttaaaaaactttgttggatgattagaggcaggctttccaattccactcatgacaattgagggattcatttgcactccaagatatatttattttcttgaccaccaaggaaatataatgttttaaagaagtaaggcaattcatattaaatggaaaggaactatctaaattgaaacttaatggggtcatattttaacataaaagtgaaaacttaaagtaaccttcagagttactaattagtttgatactagctccactttttctaccatgtagatttcatttagtagaggagagtaaaagaagaacattaattaaaattggaatgattaattttgttatgtgtctgtgtaaattaattccagtgtcagtataaattaactccagtgttagtaattccatagacttcctttccatggtttgcttcaataattgagaatttatcagtcattctgatatcagaattcaaataagtatttatacgtgcttgtgtgtatggggcgggtaaaggacatgaaaatgtatagatatttaagaaatgtcacttttactccaatttcttatttatgttaggatagccttcaattttaagcaaaacacctatttagaatgtttctccttcatctccttctctacctaggtccctttcccttttctcacaccacttataattagaagcaagtgaacagctttgcacttggcagagattaaaaaacctttttttttctgttgtacaaggtgatttttgtgcaaacaattgctatctcttccatcaaaacagtgttctctctagagaataatgcttgttaggtcagtttggtgtggcaatatttataggggatacgcttgaatgactgaaaattgtaagtggagatgttcacataacatttgtttgcttctcttgtccaccaaagtaattcataactgtagatatctttttatgtgttgactgcctcgttctacaacactgacaggtgttggtgactgcatattttttcctaattccttgaacatattcacagaaagaataaagtttagtttgggtttctattgttattctctggatgcaaaaagaattcctagctcccaaaatgggtaattttcttgattactcatgatctatcatgtagttcctctgtttgttttaatttcttaatatggagtaatattttacaagatttccaaaatacttagatcctcatctatattagaagtcagtgtgtgtgtgtgtgtgtgtgtgtgtgtgtgtgtgtgtatgtgtgtgtaaaggagaaggccgcatgctaggctttgcgggacacactaccctgatgttgtagtatgaaatagctatctataaacaacacatgagcaagtgagtgtggctgcatttacataaacctttaatatataaagaggtattgtgctggtttggaactgggtatagtttgcctaccctgctctgtgataattactgtggctttatctgtcttctgtaacccatcgtcttccacatcaccctcctggcctcttccttctacctggtgatagtcgcctgctttcttcttcttcatttttcctcaagttatgctctccacctttgcatgctttcttatctgctatctctctgctcttccttgaagattcctttgtaagatgtgaaaatgacctggtgacagcctctttccccactgataaccagggtttattcagttgttctgactgtccagactgggctgctcctttctcctttaccatttcaggaaagtccctcctgaaatttcattcccagcagaaaacggtgaccttctcagaagaaggtggctttgctcctttaaagtgggagaaccgtctttgtgaagctgcgactgaccactctatctggaaagggatgcctaactctccaaatctcttgcaagttttttgacctgccatcgtgaggtggcccctgttcctccctcttcttccttctgttcctcacttttctttgggggtgagtttatgttaaggagacttctgtgcttaaaagagggcctctttcttaaaagtttgtacctgaattgaccccatgggtgactgtctaaaggtaacatgttttttttcaaaagccaaaaaccattgctaatatggtcatagagtaagtcgttggtagacttgtatgctcatcgagcctcaacagatcatcttcgggtgatgtgctgcctcacatctcagggaatcttgttccaagataatattcatacccctttcttcaaaatacaggctttggttttccactccattgaagaactgctgaagaataaatgtcttcatatgttttgccaactttgccacaagctgctttttgcgtccagctggccataggtcttttttattccctcctgcctggccccccgtcccgagatgcctggaagccatcatgttgaatctctttccatggaggtctgtttggctggcgtttcttcttgcttcagactggaatgccgattagccagtttcttggaatgattttaatctctcatctctccagcccatccatttgaagtaactaataggaccacaatgtcactgcatgagctcaccctttccttgctcaagaacaacgataatacttgtcagtgattgcaacagtggaggacagtgttggtgccagcgttccagtgactatttcaaggattaattttagtgtttctagaaagaagtagttcaaaagtcaggaaaaataaatgaaaataaatcttaaacagatttctaatagaaaaaaaaaacacataaacatattgcaaatcacccatctagttaccattcgctctcttgtgtcctttccctttctcgtgtctccttggaagtcaccaccttctgaggtcttagtcaacagacttcagactcttcctgctgttttgctcccttgagtgcaaactttcaggaccacagcctgtgggcagctcctctgctctgcctcaggctctgagtagagtagctgtggttttgattgatttctcctcctgaatctgccttacttttccttttctccagtggagagactcactgcttctgagagctcctcccgccacaggggtcaaacttttgatggcttttgaggggctggagggagagagctgtacttgtaggaactgagtggtgaagaggagcagagaagcctagagagagggtgggagagaggaggaaacactggagagggacaagaaaggggacaaaaagctgttgatcagaggctgagataatagtatcacaactgttatttcagtactcaaaataaagcatgatgcatttgattaccaggatttagaaaactggacttgtagtcactaatgatgtaagaattgctattaatatttatgaagggagtttttatatttaatatttagcatcaggcaccatgctaggtgctctgaaaacgccatggtctttcacaataggtccttgtttgatggtcagtggctatcagaaactccagacttacctactacttacttacctaacctcctgttagctttctcttcagttaaagagatgggtatatttctagtaggcaaatggccccccattctcaccctaatacctgaaatttgagaacattccatacattagtttcccttactgctctaataaattatcacacatttattggcttaaaatgatacagatttatgattttactgattttgaagtcagaagccccaaatggatcttactgggctgaaatcaaggtgttgttagggctgagttacttctggaggcctagggaagatgctgttttcttgcctttttaagctaccagaagtttccctgctcacattcctaggcttgtggcccctttctgtattcaaaggcacttgcatctgtctcacatggcatcactatgagactgacttgtcttcttccctcttctacatttaaaagacccttgaattacactggacccacctggctaacccactataatgcccatactttaaggaattaacaactttaattgaccagctttaaatcctatacctgaagtctagctgatcttctttttgtatttctttcagggccctccatggttttaggttttatttgtcttctctgttttggctcaatgtctctaattcctcttcatttttcaaagttaagttcaagacataacctttcatgaagcgctggctactctggtcaacatgctggcctttccccacagctttgatcatctttggcatatggtgttcaacacatttatcagggattatacattattttctgggtattttctgtacgtcttagccttccaagtcatatgcttcttgagactaaggatatttttgtgcctatcctaacatgatgcattgttgtaaataataaatgtttgttgattgactggctaaaaacaattctgtaaaaataactgagacacatgctggtagtagaggtttcctcgttgtataataactatagaaaatctagcacaaggctgggtgtggtggctcacacctgtaatcccagaactttgggaggctgaggtgagtggatcacctgaggtcaggagttccagaccaacctggccaacatggtgaagcccaatctctactaaaaatacaaaaattagtcaggcgtggtggtgggtgcctgtaatcccagctacctgggagactgaggcaagagaatcgcttgaacccgggaggtggaggttgcagtgagccaagatcgctccactgcactccagcctgggtgatagagtgagactccatttcaaaaaaaaaaaaaaaaaaatctagcacactgactactttcagttacctggatttcaagacccttcatttctatacctcttttttcatcttggtctcccagccccatccccaccctgcccatgtacatctagaactattaagtagttcaaaagaccttatgatgacatgccagctggcctttagcttctaaatgttctcatattacaaaatatattattcctatcctgttgttctctttgcacatctaaaacctctccagctttgaacaagtaatccaatttgaataattcatattatattatgaaagacgtaaggcaattttaaccattctgattttttattttctaacaaagatcttatttaaaaaaattaaactaaggaatttatgtgatttatgaaaacatccgctgccttctcctcttgcgctttctgctaataagagtctcttggcacttcccattgaacagtttacagctctgctttattgagaaatggaacacacacttgttcacttgttttagtggccatactatgatatggaaaagcagacttgagaaacacatcctccagtctcaactcggagtgactttctgttgctttagtttgcatttcatatctcatatactttcttcggcagtttctttcctataagtgtgaatacacacacacatacacatgcatgtaaatatatatatatatatatatatatatatatatatatttatgtgtgtgtgtgtatatatattcatttttggtcagtcaacaaacattattaacaacaatgcatcatattggaatgtgtgtatatatatatatgtatgtatacatacatagcacacacatgcatacacacacacacacaaattgatgtgattttgttgagtggagatgggtgaggttggaaaagggagaggaacgttaggtgacattatcttcctatctctgatttccttctctgcatacgtggttgaggagtgctatagtttaaatgtgtcccctccaaaattcagatgttgaaacttaatggccaaagtgatgaccttaagagagacttttttttttttttttttttttttttgagatggagtcttgctttgtcacccaggctagagtacagtggcacgatctcggctcactgcaggctctgcctcacaggttcaggccattctcctgcctcaacctcccgagtagctgggactacaggtgcccgtcaccacacccagctaatttttatttttttgtgtgtttttagtagagatggggtttcactgtgttagccaggatggtcttgatctcctgacttcatgatctgactgtctcggcctcccagagtgctgggattacaggcgtgagccactgcacccggccaagagggacctttaagaggtggttaagtcatcagggctcctcccctcttgaatggaatgaaaagccttgtacaagaggcttcgtgccatgttcagcctgccccttagccttccactgtgtgaggacacagcattccttccttccaagtgctgcagctctcacaagacaatcaaacaagcccgcaccttgatcatgatcttcctagcctccggaacggtgagaaaatcaatttctgtttttttttataaattatctactctgtggtatttcgttatagcagcacaaacagattaagacaaggaggtaaaagaagaggagtgggaagtaggtttggtaaaatgccatcacacatctggactattgagacacatccatggcaacatgaatgacagaaacctgattatgggagagaactgaccaaagtttgggaactccagcatagctgagagagtgttcttctgttcttctgaagtagctccaagtgactccaaagccacacacatttggttttagccttgagtctgctactgtatcagtggagtgatcttggacagatgtctcagagtgcctgggctctatcgtcgtcacttgtaaaatggggctgatagtacttgccttgaaggattagagagagcacacgttaaatgcctgttactgcttgatattaagtaagtgggagacattgtttctgtgacatagtcatgtgatggtagattcccagaataactttatgtgcaaagggatctgcttcaaaggggatggggcaattgactgtgaaaattactatagaagcccaattgtggtgcttggatgaatcccccatagactaaagggacagcttgggtttgagttcactggatgaggggctgtgtgctttacttgactagacctaatctgcacctgagttgacctcatggattgcattggctgctagtgagctgtgagtgttttctgagatctcggtggcctctaatcccatctccaggtggacagaggcgggctgaagcacagatgtgttggccactgttcctggccctgggcggttaggcttcagctgggacactggctggggcgagaacttagcagctcatgtggctgtggttgcttcatggctggacatgccttgccattaaaaaagtaagaggagttgactgatttctgtaattgtcttcttaggaggtattgtggaaacttttacatttaataaatactgtttagtgttaaataaagaaacaaatcaagagaaatgagtaatatattttctatacttatattctatattttatattgtgtttatatatacacaaacaagtatatatactctataaacattatatacatatgtgtgtgtgtgtataaaatatgtccctttggaaattatagtgtgctgtattttgaaaagtagactgtgatttgatatgtaaaattaaaaaactaacttctttttcattcccagtaactcagacaaagcttcacaagctggtactacaaagacccaaaggcggcagtaaattcctcttttgatttaaatcccattagggtccacacttatgaaacaaatgttgaaaatcctatagctgacaaagcagatgacttaagggggctttataccaaagaggcttataggagttattcacagaagaacttccagttgtaaaagagataaacaagctttggatctgagtggtgtttaatctgagtgtgcataagggccaagaagggctcatattgcaaaacttaccaaagaatctcagcactttaaaaccttagtggtcctggcttcactgaccaaagtttattattctattcagtcagtctctgtctctccctctctttctttctctctcgtttctttctttctaatggtgaagtgcaatatggtatctgcttttggcaccaaattacagttctgaacacctttatttacccatgtatacagctaaaaacttcttgacaacatattagaaacaattactctcttttagattggccccgtttcccaggccaaggttaaacattacaattagagaagtgtataagcaatggattaaaatgtcaggaaaaatatcaaactgggacagttgttttacttcataaagtcttagcagagctctctcccagcatgccttgtgtctttgtaatagtcttaatatggaccatatgtgcaaatagaagaactaaataaaacttaatagatcacctgagtcaagttattgaataaaacatctgctctaaagccaagttcaaatgtcctctttgtagaatcagcatgtgatgatgtagggtacatgaagcaaagaggacttcttacttttgaaattttgtaggtgaaacccagctccaccaggaaagggagaagacgggtgggagatgagagacagaaccatctgaaagcctgtggatttctgacatttgagttgcctgtatggtagaacattttgatataaggaaagttatataacagtgtttaaaatcactattaacattgctttatttttatttttctgagacagggtctcattctgttgttcaggctggagtgcagtagcacaatcacagctcactgcagcctcaacttcctgggctcaggcgatccttccactcagcattccaggtagctggaactacaggcatgcaccaccatacctggctaatttttcatatatttttttgtagagatgcggtttcgtcttgttgcccaggcttatcttgaactcctagaacattgcttttaaacattttatttttggggggcaatgcaagaacatccaattgcaatccagttacaagttggagtgaaaataaacatgatgcatggcatcaaaaaaatgcattgcaatgtggagtttgggaggccacagtagcttcaaggtgaggttgctggcaacattctgagagaaggtggtactgctggagaaagtgtgtgctctagagccaagggtggactttattgccggtcatttattccttcattcacttactcacaaattgttactcagctcccactaaaagtcacagtctttactgcacacatagacttagtgatagctccaagctgtcctagatgacattgggactgggttggaaagggaagtcagcagaccgtgtctccattatctaatttgatgagactccaagccacagccttccatatctcaaaggcatttctttgagataaggtatatttctcacaccaggtcaggtagagaaccaacaaggaatatgttctctcctcagggagaactgtatttttcacaggcttcaaaactcctgtgttgcttaagctagaagtatctcttatggtgggattttaggaacaaatggtatttttgtggataaaaggatattttcattaacctctaatatcatttcaggaaaacaactaccgacatggttttagcagatacctttttgtttaaatctgaaagagtgttaaattatctatccacatatgtttctggatgtttataaactacacatatatacacacaaaaggaggatgtgtccattaaaagacacatttaaagcagaaaatttatccatacactcacatccaaagctatttgttaaaactcttcagtatattgccattcaacctataatttctcaccatgcttttaaaaaatgtaaatttatatatttgcaggatatatatttccacacacgtatattacataatggtaaaatcaatcaaattctttttgtgattatgttatctgcttaaatatatgtgaggcttgacatgaaagtaaatataaatataaattgttattaccagttggattgttctagatgtaatgattatctttgattttaggatacttagtttacagaatgtcccttttgtgaattaacaattgtaacagaaaatgactgctcctaatagaaatccttttcatagtcatatgaacaagtagggacacaagttctcatttaatgaaaagtagagatgaataattgcttgtatcggttttatttgctccacaaagatcccatcaaaattgcaggttctttatctcgattctcttggatttggtgtgttgacctttattctcacgcatttgccttttggttgcaggatggctgctgcaactccagtcacaatacacttgtccctcagtatccctggggaatcgattcaggacctcttgtgaataccaaaatctacagatagtcaagaccgtggtatgaaatggcatggtatttgcatacaactgatgcacaccctcctgtatattttccatcatctctagattacttacaatacctaatatagtgtaaatgctatataaatcgttgttaccctgtgttggttgggagataatgacaagaaaaaagtctgtacctgttcagtacacgtgcaattttttccccagtacttttgatctctggttgcttgaatccactgatgcagaacccacaggtacagagggccaactatatttatgtttagggatgaagaaagagcaaggtgcagtacccttatgagggaaataaaactttctctaggaggtcccagtagaattctatctgcacctgtttgatggtgggcttgccagagttctgtagcaagcttaccaagcctcttgagcatttccagcctctgaagaggaaggctgaggttaagggaatggataattgctacccctgaaaggtctgtaacttcagtaaattgtgatagctggtactgatctgctgtcactggaaatagttgagatgcatagacataagtaatttgacccaatgctgtccattagaactatctgtgatgatgaaaatgttcaataatccgcactgttcaatatagtggccactggccataggtgactaatgagcacttgaaacgtgcctattgtgactgaagtgcagattttaaaatttagctttagtaaatttaaatttaagtagtcatatgttgcaaggctagtggctatcatattaggcaatataagtttgatcatctgagttatcgaggagaggaaggttgacatttgggaggtcaagtccttttatgattatttcattaaaaaatcaaaatatcaaaatgttatttccttgtgcatatgtgtttagtttgcgtttatttgttttttcttcacaaagtcaaccagaagaacaatttctctgcctaaacacagacttcttgaaaattttgcatggagattgctcttttatagttgtgaaagtttgacactacagaattttttaaaaaaattctaaacaccccattttctttcacagtactatttcagtggcagtagaacaaaatgacttttaaagggggtcatctaacagtttacctcctttctgtctgctgttgtataaactgtaaatgcatttttccgtcatgaaatggttcaatctctgaaatgtgtgagtttattttggatttaattttatttctggcaagtttcatgagaaagaaatatcagaggagatcagggaactttcagtatcacgagtccttccaggctctgatttcctcgtacacttgggtgttggtgaacattctggcagtgctctttggccaaagctctgatggaatgaacatggccaagctggaatagtacagatctcaaatgtgctaataggaaacatcactggagcttggaagtccagcatcttgggtggtgtcccatgggtttgggaggtgtcatcctgtgctaagttttgtcaggagatatgacatcaacaagtcaatttatcttccagttagaatgttcattttactgctggattcagcaacatcttttgctttatgtgatattcagaacaaaagccatgaaatgctctagtgggaaattctgtacctttaaaagcaactgttaaaccaattctggaaagttgggaagtgtgagaagtgcttacttttggactgggccacagatctaggtgggttgtggatactgctgcctaagtgtcagactcatactactcaatgaaccctgaagggttggctcaccaattaaaacaagaactaagatttgcatcagcatcctggctggaaacagatggcatactcaaagatcaactgaagtgactttaagaggagactatttacagatgtgtggctaggattaagggaattaataggagataatgaagcactgaaggccagcataaatgggacattcttatggtctctcattggcatagtttgcctatgtccccaaccagatgtcatcctgaactgtagttcccgtaatccccacgatccccacgtgttctgggatggacccagtgggagataacagaatcatggggctggttacctccatgctgttctcatgatagtgagttagttctcacgagatctgatggttttatagggaacttttccctcttggctcttattcctgtccttgctgtcaccatgcgaagaaggacctgtttgcttcccctgccaccatgattgtaagtttcctgaggcctccccagacatgctaaactgtgagtcaattaatcctctttcctttataaattacccagtcccatgtatgtctttattagcagcatgggaagggactaatccactcatcctgaaaagggttcagtagagccttggttttggaagagaggccaccaaagaggagctatgtccctgggtgcaggagaagcatccaagtgaatacaccctggccctggagtaggggtgggagaataaataacacccttatgtctttctccagttgcttctttgtttttcccatgtctcctattgtctggcacctctcagaagcctgagagcaagtgaaggatccaatccatagaggatggagaatgacccttgagggtcaaggagaataacccatgcattactgtaatttatccggtgcttctctgtgggtacaggctgctaaatacttccgtacacattagctaatttcattcccactacaatctccattttactaatgagaagactgaagctcagggaagttatgcaaatttcctcgaatctagctgctggttaatcatcaagtcagtagcctgaactgtcctcagactcccagtccaagctcttacctttatggtatgagaaggatgtggagatttatcagaagtagagggaatatagaaactaaccttatagtatcaattatagtcatagtaatgggaagaatacccctgcctgacatttcagagacattatctcacttgaatctcacaatgtttttgggagttaaaaaggttaggtattgttaactttaccttacagatgaaaaacagcaaaggttcaggccaaatgacttgctacaaaacagtatctcagggctggcatttgaatataggttttttttttttttttattctgaatccatcagtcagtcaagtataccacattgctaattagaaaatgctggcagcaggacagtttaattaaattaagccaaaaccccaaaccaaatggaaaacaaaagccatgtttatgtagatattctggtggagtactaatatctgttttaccttatggatcgctatttttaattttgtccattttgaaaagcctaccaacaatgacggtccattgtaaaagaagtgaataaataatagatgactcaaaaataagaggaaggaaaatgtttgaataaatgggtagcaatttcttaaaaaagttaattaaaaatttatataatataccaaataccagaattaattccagatacagagttaaatgtaaatgcttaatagatggagagacacccaaaagataatgtgaaggaaacagccgacattgtttggtctgtgtttcctggacaccagttgcagtgtaggggctcagaaagagttttcttttcttctggtagatacccaataatggaattgctgggttgaatggtagttctagttttagttctttgacgaatctccaaactgctttccacaggggctgaactaatttacattcccaacaacagtgtataaacattcccttttctttgcatcatcgccaacattggttattttttgactttttaataatagctattctgaccttggaatactacatagccatacaaatgaatgaaatcctgtcctttgtagcaacatggatgcagctggaagccattatcctaagtgaattaatgcagaaacagaaaatcaaataccacatgttatcacttataaatgggaactaaataatgggtacatatggacataaaggtggaaacagtagagactggggtcttcaaaagccaggagggaggaaggggatcaagggttgaaaaagtaccgattgggtactatgtccactatttgggcgatgtgtccgctagaaacccaaacctcagcattatgcaacatagccatgtaacaaacctgaataggtatcccctgaatctaaaatcaaagaaaaatagagagtgtttgtccatctaacacttgccacagctttagctggaggttactattggcttcacagatgagaaaaccaaggtgcagaatcctgtctagagccccatggcagacagtgttgtagcccagtaggagccttcactgttctgactccagactccacatcgctaaccaccctgtgctcttagaataatttccatcctgactgttagaatacagtgaaggaagaaattagcactttgttttatagacttgttagatttccataaggtgaatagtgtagctgaaagcaaataataaaagacaccgggaaaatatttgcattgaatatgacagtcaaagggttaaactttgtaacaaaggttttaaccaatgcataagaaacaccatgttgataaatggacaaaaggatatgaataaacattagaatatgcttagtaaacacatttgagaaaaattaagcttattaataataaaagaaatgcagattaaaataatgatgagatagcattttgcatatttcaaatggataattttggggctttttggttgttttttaggctaatactagggaaattactaggcccttggtatggtggcaatggaatttgaacagccactttggaaaagcaatttggccacaattttaaggaatcataaaatttctacatactttgacccagccatcccactcctgggaatttgtcctgaggcaattattaaaaagacaacgaaagccatgtgtaggaaaaagttaactgcaatagtatttataatagtaaaaattggaagtcacctaaaggtctcataacaggaagtgatttggtaaattatggttctgtgtattagggttctccagagaaacagaaccaatagggtacatgtgtgtgtgtgtgtgtgtgtgtgtgtgtgtgtgtgtttgtgtgtgaagagactttttaaaattaggaattggcttatgtgattttggaggctgagaaatccggacccagcagagctgatggtgtaggttccttagaagtcctagttttaagtcaggagaagactgatgtctaaggttcaaagacagtcaggtggagacagtaattctttcctactcaaccttgcattctattcatgccttcaacaggttgggtgaggcttgtgtaccctggggaggacaacctgcttcactcaattttactgactctaatattagtctcatctagaagcaccctcatagacatgagcaatgtttaaccaaacatctgggcaccctgtggtccagtcaagttgacacataaaattaactcttacagtctgtgtaaccagcaaagtaattataaaagccacatagtagtatgaaatactaatgatgttaattgaaaaagggaagaaaaattatatttatactatgcttttaattgcaaacatgtccacatgtagattggtattaagagtaagtacggaaaaataaaaataacaatagtgaccataacaggatggggaggttatggctcatgtagacccgcgaacacatgggctttttgtggcactggcatgtgattcagggtaagtggagttctgggtgcatgaaggggagtgttccaagatcaggttgaatagaagttagaggtaagtaaggaaaattgtttgatgccatcctaaagagtttgaactttgttcttatagacattggaaagccattgaaaatgttataagtaaatttatatttggggaattctgacagcactgaaggcttccgagtgggagaggggtgcttaggaggactttgtaatggtctaggcaggaagtgagaacctcaactagtaatggcaatgtggtgatggagaggagtggagttgcttgacaggaatgtcagaggggggatccccggcatttgccaagtgctcagatgtggacatgtgggaaaggaaggagggaagcaggactgccactcttttggcttggatggatgtggttaagaggaatggggagggaggcaacatgccaggttccgtgttgagtttactgggagtcaggtcatcaagaggcatcctgtgtttcttccaagagacagttggaatataggtcttttccttgggagagagggaatggtggtggaacttgagcatgattatctgtggccgtagatgaaattgggagagtgtgggatgcctagggaaactgaatatcaggaggaaagaagatgactgagggcagtaccgtgggggaaatctaaggtttaaagatggaaagaggcattgatgaacagctggggaaggagtagtttgaggtagatgtgcagatggaatgaagagaaggtctcaagaagagggtggagccaaagagggctgcagatttagaaggctaaagtctttaggtggctttggatagcctgttgtatcttggaccatgcaggttacagtggagcatggagtggggacagaagtggaggaaggaaccagggaacatggagtgagaagctaaaggaaagtgatgcagtagatacatggctctaaagtactcaggactttcagaggcttaaacatagggtgaccaactatcccactatgcctgatactaagggcattccctggatgtggacctttcattccccaaattaggaaagtcttgggcataccaagacaagttggccaccctactcaaaagtatgtaagctaacatatctgttctctaagaggttaaagctggatggggataccagatgtatgtacgtgatgcagttaaacagcaatacaagggggcaagtctacactgatcggccaattcagtgggacagacagtttgggaatgtttttgaaaatatttatgggttaaagcaatttggtgaaattttggcaaaaataagctgaattttttttaaattttttttttcactaaaatatcaagacagaatagcacaataaaactgtagtgaataaagcactggtataaacattgtcagttttaagctaaatagctttcttattgagttttctaattactgtttgatttatttagttttaattttactccaaagggaataaaaacctgtaacaacattaatttgcattaatgcggaggtggagtgctatttgatacgggcaaacactgagtttacagaagttcaatgctaatagcccctccatcctagaaaagacccaggttgtgcaggggggccgactgaactcatagaatcacctccttgtttgccaggctgggccctgcctgctgccatccctgggtgttggagttcctacccgtggttcagtttcctggcacaggctcccaatcacattgcctattggttcactggagagcatgggccgttggagtcctgacgtccaacccatgtgggcttggggccaacttctgggtctctgtgactcattttcctcatcagttgtacagtccttttgtgaaaattaaaagcaatgtttgtgcagtaaggatgcccctccatctggggctctctcacctggctgcttgccacttgctagttctagacaagtcacccaacatttccatgcctcagttttctctgtaaatgaggtttaaagtgtcatgggagcctgggcaacatagtaagactctgtctatacaaaaaataggaaattagatgggcatggtggagtgtacctgtggtcctagctacttgggaggctaaggtgggaggatcactctagctggggagatcgagactgcagtgagccgcagctgtgacactgcactccagcctgagtgacagaatgaggccttgattcaaaaaaaaaaaagagtccccaaaacaaaaggacaaatggtgtcatggaatttacagtcgatcacatatatacagtgcttagctcagtgttcccacatttttattcttagtccctcttcaaccatttactagcatatgaccttagacaagtgtcttccttgctctttatttccttatctacaacaatgacaaaaaaaaaataaaaataaaaggggcttggccaggcacagtggctcatgcctataaacccagtgctttgagaggtccaggtgggaggatcatttgaggccagtagaacttattgagactctgtctctatgaaaaataaaaaaaaattagccaggtgtggtggtgtacacctgtagtcctcctagctacttgggaggctgaggtgggaggatcacttgagcctaggagtttgaagctgcaatgagctatgattgtgccactgcattccagcctgggcaacaaagcgaggctgatatggtttggctgtgtccccacccaaatctcatcttgaactgtcgttcccataatccccacattttgtgggagggacccagtgggaggtgattgaatcatgggggcggtttccttcttgctgctgttctcgtgatagttctcacaacatctgatggttttataaggggcttccccggacttctctctgcacttctccttgctgttgccatgtgaagaaggacatgtttgctgccccttttgccatgattgtaagtttcctgaggcatcctcagccctgtggaactgtgagtcagttaaatctctttcctttacaaaatacccagtctcgcgtctcgggtgtatctttattagcagtgtgagaatggactaatacagtgaccctgtctgtaaagaataaataagtaagtaaataagttaattaaaagggcctgaactaggtaatttgtagagtcttgcccagtttttgaacattgtgttttctgtaccatcaactgaagcttgggctgagggttaatatatgtgtattagtgtggtggcttgagagactggcttcaggagaagatttcaatttagcatatcctgacctttgaaagtgagaatttagttgaggatgaaagactttaagagggtctacaaagaaaggagtatggatcaagattagtctgtctttatgcagatccatacagagggtttctgttgagtaaatcaataaattgggcagagtgtgggcttgtttgcctgcatccctgctacttgtcttctgtttgttaccatagctccttcttccccactctgcagtctggcctgtgtctttggactttgtccatcagtccactccttctttcttccctaaatcccagggctcctaacctggactctgtatatggaatctgctttcagactgagctcatgcactttctctcaaatgctggacatcctgcctatttgcttacctgtcctctgagacctgtctgcaccatcctgcttttgggtgacatttctatcctccaggtaattgctgaccctggttttggcctctatcctgccttgtgctgttgctggcaaagcttcagcttggttccattattgatttctgcaacgtgtgcgggaagagttactctgtgattacgacttgtgcaacttgacagtatatggacaggggttgaatgggcacaaaaagaagtaaaacaagtgaagattgtcagtgatttcttttctatatttcttttgttgtcatgctttttttttttttttttttttttgctcaggaaacaaaattgtagagaagttatttcaagtgataaaaaattcatgaatctatacaaacttatgttgtgaacttttgtattagttcatgttgaatcatttcaatcagctgccatattccagtcactctcacaggccctctttggttcattgaaaaagaattagtactttagtggaggataaaaataataaccggttaatgaaagtaaaggactattacagagatagatatgtataaagattttgggctgcacagccgaggaaacactcagttgtctggagttaggcttggggaggattcccatcagaagtgaccattaggctgaatcttacaggtcattatagatggagagcacagtatagtgaaaggctcagaggaatgaaatatgtgttagaaattgactggtttggggtagttggagggtgcgtgaggagaagattaagcaagaagggtagaactaaggaccatgtttagacctaccttggaatgccatgagaagcagattgtctggtggtgataggaaattcttacaaaatcagaatgaattgactttaagtgactttttaccatgaggaacttgggaaataatgattgttcatttcacattgagtatctctgtattatttgaagcttttggagaccttctttataggactagtaattctggctcctctttgtaaattaccaattatacactgaccttctccaaccagccctgcgtttgagctgggtctcatgttttctgtagcatcctccctgtctacaggtggagccacctgctcctctctcaccctccatctctctccattttctgatcccaagtgagattaatgaatcttgtttacttcacagccagggaaaaggagaggctttgaatgaataatttctgactgaatttcttcttgatgctgttttctctccagaaaggcactatcattaattaaagcaaagtaaacaaagcaaatcctaagcagctgagcttcatattttaaaagacccataaacctcatcagcataaaataaattaaatttggagcttaccaagtgcacactttcattttgatggagtgttctatgctctggatagaatcgtctgaagtcatccaaagctcagacagggctccctgtagatcctggacaaaaatgggctctgtccccagttggctgctccagcaaggaggctaatggaaagtaaaggacactggtagccaattccagcagccttgaatgtggacctctgggccatggttgtatagtgattttatctacttatctatttaaaagtacttgagatgtgtacatttcactgtgtaaattataccccaataaaattctaagtaaacaaaaacagttatctgcttatttaagaaatcttccttctcctttgcttttttttaaaaaaatatatgtatatataaaatgagagttctaaagtgcctttttcaggagagaattttgaaaattaaaaggacagtgacagtaataacatcatttgcagctctgggacagtcactgttttgtattagttttctcttttgaaagtggcataccacgttcttggttttgtttatgggttttatttctggtttatttcctcctcatatgagaagcatatttaagaaatactttgtaaaaacctgtatagttttttttatttttttactttttaagagcttgataactcgaggattactcacatgtgtttttaaaaggttaaaacctaagaccctaatctaccaactctaatttgtagcatctccatcatttttctgctcttttctctgagacatggtcatttagctgctggtcatcatggtggtagtatattcttcttcctgtgagttcttatctatgcagctttctcatcccactgttttggaaaggaaaaccatcagaacacccaaaacaatgatgctggatgttggaggtgagaagcagactgtcagtatcaagctctgaatcgggaggagaaaccttccaatgagtctgagcgtccacttctcctccacagctgtagatgcacgtgcccccgggcatgttgagggggaccacgtggcaagcatcatagttgctgttagctattttaaaaagctgtctttgtagttcattcttctgctgcctaggagtctgccagtggaatcacaaggccaagtattgacagcttcaccttccgagagcccttcttcttaaagccgagtgtctggctatcaagccaggaaggcttgggtcactgagggggacatcctcttctgcaggaaatatgaggttttgctgaactcctcctggtattcagtgatttccagaccacgttctgcagaggtgattctgctgtctcacaaacgattttgattttgattttgattatatttttaaagtatcttttcattagttggaaaccataatacaaggcaacacaaatcgtttactgtgttatgcattacatttgaacaggttggttggtaaaccaccagtacattaattggagatcatgggtaagaatttaattcttttatttactttattctgattttatcataacatttctctgccatatctgtgtacatatttgaacttatgataaaacatattcccgattagatgctaacactgtttgtttttggagtcaagcctacacctgtctatacatacccttttcatgggaactccccatggtggtagtttgagtgctcagttgagtgtaggaacgcccaggtgcacctgcttggtcactgctctgcttatggtcaaggggaattgtgagaataaagaaacatgctgcaacctagtgtattttaagtaagcatttaaaactttcaggcagaactaccctaaacagcaccaaaagataaatgaataaatgatacattcaagaaaatgtattgcaagacatttgactaacaaaggttgtgttctcttaatatgcaatgtgctttcacaatcaatatgaaaaagacaagcaatccagtagaaaaatgggcaaaagactcaaatagagtcacagaaagtaccgattttcaataaacatgcataaaagtgttcagcctcattcagttaataaactgtaaaatataacaatagttagagttcccctgcccaccactcccctctgctgcagacccaactatcgtatcaggcaagtagcagttaaaaagtaggataaagcctatgctgatggatgagggataacaggtgctttcccacattgttgttatttgtgggagtgttaattttctaaatatccatatgtgattagtaaaattgtatcatgatttatcacaacactattgagcctaaggaaaggagagagagagaaaggggggatatgctgttagggaaaaattttggatatatagtaaaaatagaaagtaagctgtaaaatagtacatatggtatgatcacatttatatatatttgtgtgtgtgtgtgtgtgtgtgtatctatataaaaatgaaagaagagtcttcctatgcttacaaatgcattgaaatttctgcagtgagatgtaaaacaaaaacaaaagcaaaataaaacaaatcaacaacagaaaaccctactgatggtggttgactctggggtggcacattgatattcagggcataaagatcaatcttttgtatttcattatatgttcttctatatcactttaattttattttttacagtgaacaggtagatagttagtgaaaagaaaactaactaataaaacagtgctcgattctttctcaatcattctctaataatgtcctaatcttccctcatatctgattctagaatcctgttttttcaaatccaaatacttgtagatttgtttttaattgatgaagccttcaatatcctcaggatctacttcttaagaagtgagtatattttggctgacttgccttgacagctcactggaccctcagcagcagggaagggcagggtggaagaataccatgcttgctccggatgggggatcctctgctccaggctctcggtcaagagcagtggttaggaaaatacccccaagtaagatgacttgagtttagatctttgctctaccacttgctagagttatgctgttgggcaagctactttctcagcctctgttccacactgtaaaacaggactactgatgttaaccacacaaaatggtatgaatgaaaagttatgctacctaacaaacactacttagaagggaatctggaacacagtcctgattatatcagatgttgtcatcctttcatttatgtttgtttatagacatgcccacctctgctccatgtttcggtttccttaactgtaattaaagagagctgaatgggataacagggaaggtcttcttcatgttcaaagtgtaatgatgtaatatttgtatttctgatgcactctgaattaaattctacatagttaaagattatgtagagttgtttgtggtatttgattgtgaatttactgcttcatgtgtttttaatcaagggtccttgggtagcttaaatgaagacaacatattgtatgatttgtgggttcttttctcattgacagaaattatatacatctgtaccaagtcaatgtcacatatctattgtgctgaagactgagaatagaaggaagatataatgtttacctttgagaggcacagggatatatgacttaaagaattttgggaaagggactgatcataaaatggactgttttggtcaacatgttattgactgagaaactgcttggaagaattgtgagcaatttgctattcttgcaaggaaccctagagtttagaatatggaaactacccttccccgaatcaatgcttgttctagctttctgaagtctaggttttgcctttgtatttgactcatatactctgaatttaattttcctaattggaaaaagccaaccttggatgcagatgagtgatgtagacagatgcatccttgaaagaaatgacactcaaaatggctggagagcctggtgcggttgaatgagggttatggttggatggtgcattggatgtggagggcaagggggtgggctgtcctctgtgtgctgggccctatgctctgcctgtttatctaacttaattctcatgaattatcttggaagctgggcattttgccagtgacaaatggaggcttagagggtttaatttccccacctgaagctttaaggtagtaagtcacagagcctggattgaagtccaggcctgacctgttcctcaactcctccatttttctcgctacctctggtctccttggttaactttgttttatttcatgaatcacagagtatattttttaaccccttcctctagcatcattaatttttgttggttacaaaaggggttcaatttgagagtaagtttgaggaactagcttggggtcacgggatggggatggggtgagagggtgcacttcaggtgggtcagccgggacgtgtgggacaggagaatggctggaatctgggggtgggagctcctgccttctgattttgtctcttctacctgccttgctgtgctttgagttcagtaacgaatcctcaattttctcacatgtgaaatggggacaatattacttaattattaactacctattattacctaatgggagtatctgtgcacctcccaaccgcattctaaaccttcagatagcagggataagcacaaggcccagtctttgtcaaagaaaccttttgttatatctttgtgccctactcctatgagcatttgtagagggataccttaacatggaaataacaatctaaaataggacatcagagaggacacttctccaaatccagctgccctttcagctctagatagaacacagagtcctacttcacacttgccttcatttcttagtgtcattctcatgggaatttcctgttcctgctgtatgggaacctgggttgtgtttcctttgacagaatagggaaaaataaagacagtgtgcagcacgtggcagctgtaacatctctctgtgatgaatttctacttactcttggtgaacttcaaaaagttgttctttgaaagggaattataaatttctccagaagaaacttttagatgcctgattcaagggcgttgaggaaaattgtattttaaacatgacttaggaaaaaataagcagaatcctcaaacaggtgttttctctttgtcctatcccctccctccaaaaatgcaaattcagagaaaaagagaccataataaagacctaactttacaaacaaactgagtaggtctggaattgttatacattcaaccagtttgataccacctgtctttgtgcaactgtaaagttaaaactgattttagaagaatgactttgagatcaactaagattctgatttactggagaaagatgcaattactttcagagttgtgtccagccttaagatgagtaagaaattcagtctagtacatacaattttcttaaaattctgattaattggaatttgcgaatatattgtcccaaacatttcactgcaggctactgttggaagggatgtgtatagctgtgttgtgatgctttctttcccagaaactttcttttctgacaacctcatttatccagaacacagccagagtctggcaatagtgggaaggaaagtcctctggaactcagacagctgccacaaagcccatgcatcacattctgtagaagagatagagagctcacacatgtacattaaaaagagaatgtggtgcttttttggctaatggcagagtatatacatttctcaatatcctggagagcatttctccattttagcccagtaacaaaatttatgttcaaatgggtaaaaaatatgaccaataaacagctaaattttactcgtgtagtctgtttaagaaaaccacaagcatgcaaataaagatttttcattcatcactgtcaatttaagacttggcattgggagagatcagctttgcatttagactactgtccccagaacagttaccgttcaaagtgctgaatgaacaagtaagtgaaggacagaagggatataggcatattagatcatgtgggacgccccatttctcagcaacctgcacaaaataggtgttaactgtaattttgaatcaagtaaatgctcctttgctccactctgatttgtgctcaacttaattcccctaaaccagcctctcctatttgtttacacatttctttgtataatctcttttatatatcatcatttcactgtccccaagttgctctccttttctcacttttggggacagaatacaacattgccacagtaaatatttcttcgttgtaaggcagctttatttggaaaggggctttagaaactagtagtcgatgcagtttttagcactgactgtctgcagccacagaaagcttgattaaattttaattaaagtatacttaattaaatcctattggctcaaaataaatggaaaaagtgattaaccgtccttgactgtttttgccaagctttcaccaagctttccctaagcttttaggtgtctcccctggaggggaccgctgctgctggcagataccagagcttgcctggaaggatggagcttttttcctgaactgccaaagttcactgctggcttctagcaccatattggcacatcacattcactcattttcctatgttctcaataaaatatctgcacgtaaagaatttataagacaaaaagctacattctttgaattttatctttacttgtgtagcaaaagatgctgagaaaagtgacttgaagtcttctgactttttccttctaggttgtttttttttttttttttttttttttttttgagacaaaactccagcctgggagctttgtctcccaggctggagtgcagtggcacgatctcagctcactgcaagctccgcctccccggttcaggccattctgctgcctgcctcactctccccagtagctgggactacaggtgcctgccaccatgcccagctaattcttttgtatttttaatagagacggggtttcactgtgttagccacgatggtctcgatctcctgacctcgtgatccacctgcctcggcctcccaaagtgctgggattacaggcgcgagccgccatgcccggccttgccttctaggtttttgtgtcacctccttgcttcctgtttggaatggatcctccccctcctttacatattttacttttttttttttttttaagttcaagtagtcgctgtctgatactaaaccatctcagaggtcatgtcaagagaaagaaaggttaataaacaaaaatttagggaagcgggctttataaaaagtaatgaccttgctcttgggagatattttgtggtttgaaaaaaagtgattatggtgaagattttcaacatgtatgttcattttccttggtaataacctttccttgatagagctatcatggtagcctgctatcaatgtgatcctaagtgcttgaattttgaatgctctggaagatcagaatttctgcccttaagcaattgacaaataaaaatgaacctgagtaggcatggagggactattatacttagcattaaaaataaacttatctaggagagaaaaaagaatagcattccacttacatttgaagtaagggcatctcaaggatgatgaaggatcactatttttcaaagccagaggattccaggctaggttgcagtaattaataggatgtaatatatgaaatggacaaaacatgatcaatgtttaatttccaagtcctaattcaaagttgtgttcctggacaattcggtggctgtcttccatgtggtgattcagggatccaggcttcttccccactgtggttccactgcccctgtggcctcattgactgcacctagttggcacaagtggaaagatagcatgaggaggcacagctacttccttaaagattttgctgataagaggcagatgttctttctgctcacattccattggctagaactcagtcatcatttcatacctaattacaaagtaggtggagaaattgtggcccagatgagtgcccacaaaaaagagaagcagactctggtgaccagccagcatcccagccacagaaactatgtaggtgagggtttgcaagtggttgacccacaacccacatttgccttgctggtatagttcctttggccagcacagtgcttatagaattttaaaactgtagcaagccccaaaagatcaggacattttgcataagatgtggccctctcaggtgtggccttttttgaaacctttgacagtctgacagtgttaatcccccttttttatttgccactctagcctagaattgaacagcaactctaccttcaaagggagcatgcacttcttttgtttgccacagttctggccacttcctgtcaccccccactcttactctccagccatgaaagccaagtatcatttgccatttatcatcttacaccagggctcctctctaattttcattaactgtgagactccaggattggaaaccagagcactgataataccctttctctcccttttcctgtccctctccctcttcccctttctcctcctgcctcctccgtccctctctcattataccacaggagttaagggacacatgttgctttgaaactgaggatgaataaataatagttttgttcgttaagaaatatttcaatgagtttatagaattacaaatgctactggaaggaaagaagacaaagaggaaggcagggagggagggcagaaaggaaagaggagaataaaggaaacagtgaagggaatgccttctatgcttttgagaaaagctcctagatctctgcataaaaatgtggctgccttttgcatgaatatgtttcataatccctattctgtttgatctaaaatttataattgcaaatgggatctttatcctctaaaaccaaagggcagggatatatgtttctttttgagacaattgttacttggattctatacatatccaaggtaaaccagatgggaagtggtaaaagatgcaagataaagtggtgatctaagaaaaaaatgtttcccttctgattgagaaggctgttcatagtgattgatgaagttactgcactagctatgcactgagtttccaggtagtgactgggcacttgctcttctattttgcaacgaagtatcagagaaagctaggatctggaggcaaccagaaatggactcattcattgacctggtaggaagagtcaatgaagccatctcctttacaacccagaggcctgggaaaagcaaactgattatttgtggtgattaaaagagaaaaacaaatcaggaactggagcttgcagttgctttggatccagttattgcttgagttgtaaaatggaggataaattcagggaaagcagtgtctccagctaagggctgtcactgagttaatcctctcatcctgtgtgtaggggtctcaatggcaacacagtgttagcctttttccatttaccgagccgtgttgtcagagccccattgcagtaagtggttgggcatcactgttgtcatgggcatcactgtgctcaaggcatctgaggttctaaaggtgaaggcagtggtttcaatccttgctagggaggcatttgaaaacacggattctaaactgaaatctcaagcctgttgtgtgagaattacagggtggcaggcagaagaatctgaatttttgtcaagtgatcattacacagacaacttggtatgggtctgaccgtctgcatctgagaaccgccagctgagtgactgcctacagataaataggtaagaaggagcagagcaacgattcaaacccagctggctcttttacctcagattgaggtcgtcctactagatccaacccatgctactaatgttggataacaaagaaagcaagagaagaaactcatatttgttgagggcctgttgtgctaaggtgctttttgcatgttttatttcatcctgtgctaatactgtgtggtgagtattttcagttcccattttacagatcaaggtactgaggctaagagaggttcagtcccatacttatggcctcatggttttattttatggaagggtagaataagattgaaatccaggtccttagtagggtgctttgcccctacaccaatgttatgcaagtatttgtctagatttttgcattctcgttcttactctaaatgaagacttgtgtaaaacttgacttcaaattttatccttattgatgaaattaataattatattagtagtagggaaagcaaaattgaacagaagaggaggcttccattttatgcttatagagacccaagctattggtctacgaagccataatcaaaacttagtcatctcccaccttgcttatcaaagtgtagtcccaggagagcagaatttgcatcacctgggagcctgatagaaatgtaagctattaagcgtcaccccagacctactgacccagaatctgcattctaacaaaatccctcggtgattcctatacacataaagtttgagaagcattgttctacccaacagctgttggaagacagataccttacagagaaataaataggctcttggtgttgtccctgccaatgcaaatatatgaagtgctggttgacagagcatgagccttggcttcagcccagcagatggtttgtagatagaactacgggtaccaatacataaaataaaatgtttgagttggtcgctttcgtggagttgttagtatatttatttaacttatgatgtcacggttaaagagctagaattgggtctgtttagcttagaacataaaaacatacagcaaatccttcttatgtatgggtgcttatccaatgtgttttgatcatgaagaggtttcttgttcaagttcagtggggagaatttataaactgaatttaagggtcttgtcaggccatagagtctatttcacttaaatgagtttcttactttcttatacattgtttattgtttctctgtcattcatatccctttcctgataactcttgggcagaatatttcaatattcaatgaacattgaaaagctaaaaataaaaattaaccattagtcttgatagttgctaggatctttggggttttttttttttgtacttatactagggttttgtttgttttttccttaagcaataattattgatttgtttttatgaggaatgttcccagagtgtggcttcagatgaatccgagcaacaaaaattaccttggcaagtgattttgtgtatacttatattttttggtctgagtaagaaaaatctacatttcacccaaagcacacaggatctatttctgcatcagccagataatgagacagtaattggtgtgtaagccgttcattctccaagttttctcacggggcataatttgtctcttatttgtcagggatgggttctacgaaacaacactcctattcatgatgggcagagcaaatgtacgaaaacattatcatagctgggattaatggtccactatggatttatgtcaagaatgttaatgatttgtttatgaataagtgggcctgtcgcatggtgaaacagtagcctgcagaactgctgaatggacagtttgcttgcagaggattcttgcaggaaataaatactcttgccaggccttttgcatctcttaagtagctactgtgaattgactctaagatttgaaatggtggcattgacctccccaaatcctgtgatccctgctgctgatcttgtaactctacattttgttgacataatatggagaaagaatatctttttagggttgaatataatttgggttttgtgtgtgtgtgtgtaaaaggtggtgagaaaataataatttaattaaatctcccgctgagcaaagtgcccacgacctccacccaccagattgtgtgttctttttgaagtgtattttaatttgtggaagatgtgaatttgcggcaggttttaattggtagataaaagtgttaattattgccaagtagagtctaggaaatgaaaaataaatcaagattacttagtgattcatacatgtacacatatacagatggaaagatacacaggtagatagctgtaaaaaatatagtatgtgtgtgtttgtgtgtgtatgtagtatgtgtgtgtatgtagtatgtatgtgtgattgtgtgtgtgtagcatgtgtgcatgtgtctgtgtaggttggctgtataaatgtttaggatgcaatttaatgatgtgtattctagctactttttaaacatttatgttttcaggaaggatgatgttgactttctcttgagaagagatttaaagttaaatgttattctatttatgtagaaaaacattaccttcttcttttcactttgggatagaattagctaagtcaagtttttcttgaatttcatccaaaaggtcttaataacgtaaataccaaagtcatttttttgtaaagttctagttctcattgtaatctgagaagtttcacaccataaatctgacctagagaatagtagcattaggctcctggataatcaggaaaaaatatatattcgtttaataacaatgacctctgcatgcattcactgaagaccacccgtaccacccataatgattcattcacttgatctttatagcagtcctcactgttctgaggttacaaagccacaggttgagccccgcatcaggaccatttgggtccagatctcatgatcattccgttgtacagtatacagcaggatcaaagcctgtgtgacctcacccgtcgtgttttctcctcttgtctaaattgccctcatgattctctaggtaggtggacaaactaatcaaatactattgaaacaaaatggtgggcacagatggccttgcagggatcagagaactccttgacaagatgtgaaaatcttgtatgaattttgtgctttttgggttttatctgattcttcaagaggtcagtgatccctgcaaagatcattttaccatgtttcaaactattaacttagtatatgtctaatcatactagagtggattaagatgtgttttttcaccattatcatcatcattttttgtatgtagtacacataattctgaagttgagaaactaatgttcctaagtactcatttaaaagtcactctcatttcttgcttgtcacgctctctataaactatagtttcctcccctgatcagcagctctagcaataaacaacagataaatagacttgacctcctcttgccattttaaagttcattagctgtagaagggactgagttcaggcatggtgtgtattgatcagggttcttccagcattaagagagaaacaagtttagtttgccaaattttcagctctattaaatttcattttaatactgtaataaacctcagtaaggtttattacattagacctatgggtctaataggtctaaataggtctaatggtctaaacattagaccattacaataaggtccagttatcattaagcaaacagttggatttggcatagagttgtcagcagagactcattaaaatgaaatctgaaggtaatatgttgaacatctaccatgcacaaggcattagtctccatgcttggagaagggaagatgtgcaaagccttggccaaatgcttaaggagctgggtatgtccacctgtgtgtagatggtgatcatgactcacctgtgtgcagactacttcatattctgctgctcacatttccgtcccttgaattttgatacaataaacatttcaaggtaagaacacttgactctaaatgctagattacagtagtatagcatattgttgctggtagagaaggtatatgaaattatatcatttatttttcttatacagtaagtcttcacttaacattgtcaatggattcttggaaactgtgactttaagtgaaatgatgtatagtaaaaccattttttttctcatcaatgttataaagaaaagttgttaaagaaaacaatgctgcttgaggacctgctgtatgtttcgcttaaagttgcagttttcaagagcctattgatgacattaggtgaagacttactatactttattaatatattttggcttaaggatttccttcccccatcccctttgtagatataactctaataatattgactgccaatgagagctgaacactgatcctattactttgtagccctaccgtctatatcaggaatgttttacttggagtctatcaacttcaaggacactggctctcaagtactggtattcactagaatcaccaggcgttttgtaaaaagtggagatgtctttctcctactgaatgatcttcttttgtaaccggtaccccaaaggactctgatactgaattggctggctatgtatatggacttcaaagagacatgagcagaaacccctgaaactgttttctaaatctgaattgtgcttattttctgaggagaggatccatggttttgtttagatttctaaagaggcctgaaatccaaaaagaatttatgaatcactgttcttaggatggaatgaaggacattaatggtaaccatatatctgttattctgagctctggagataaatggattaattcacagacagtgtgatgaaatcctattgtaattggaacactattaaagtaaaccatttccgcttacaagcttataaaaagtactgcttttgaaatgccattttatgtactttgtcagtattacttaaaagtgataataatagttgatgaccaggtgacaggaagatttagcttatattatatatatgcagaagtacattatttatgccttacctgaggctggtatggtggaatctgaaagtatcttgtgaacagtacatcaggcaactggagtactctttcagttagccatcccagtacaatgctcctggaagttttcagctcatgccaaaccccttacctgccattcattctataggaatggaatggtaagcaggcattgataactcaggtcagacatggtgcaagtataaataaaataatgatgttatcaaagtaattgacttgaattccaagaaaaattctttaagactcaatgagaggagtgaataaaaggcaaatcgatgcccgccctggattcatagcttcttcagttccctaaaacttcttgataatgaggacattttgcagagtagcgataagaacctcatattcttcagacgtgttttgttacacttccagacggtcaaattagtgggtagtttttctttagggattacgtgtgcttttctctttaagaaatgtttgacaattgattcccagaattgtgagagttttctctgtgagtgaagaaatactttaaaaaaatattttaaaaacacaatttaaatactagcttcacttctatttcttttcacataataggtggcaggaggaaagcctaggcctaaaaaatattgtgggagccataggaatgtggctttggctggttgagacatgaagaatttttatcttcacagccagaaagaaaaaaaatgccatggaagccaaagtgaatatggtttattataaggaaaatgcgaataaaaactttagtgagatactacccgacacctattgggaagcctactaataagaaccagaagtaagtattggtggtaagaatgtagaggaattggaaacctgatgcactgttggtgggaatgtaaaatgatgcaactgctgtggaaagcagcgtggcagttcctcaaaaaactaaaaatagggttaccatatgatccggcaatttcacatctggatatgtacacgaaagaatcgaaagctggatctcaaagaaatacttgtatacccgtgttcatagcagtattatttacaatagccaaagcatggaagcaacccaggtgtccattgacaggtgaaaggataagcaaaatgtggtaaatccatacagtggactacccttcagccttaaacaggaagggaattctgacacatgccacgacatggatgaaccttgagggcattatgctaagggaaataaagaagacagtcacaaaagaacaagtatgtgtccacttttctgaagttcttacagtggtcaaaagcctaaagatagaaagcggaatgatggtgttaggagttagggagagggagaaaacgggagtttttgtttaataagcatagcgtttcagtttgggaagatgaacagttctggagatggttggtggtaatagttacacaacaatttgaatgtacttaataccactgaactgtacactgaaaaatggtgaagatattaaattttaagttatttgtattttaccataataaaagaaatagaaaaagggaagatgatttagaggttttcacacagttttaaaaaatggctttcctagttttggtttgaacatggtggtattttcatagtgagaggcttcatggtatcgaagcatatcagaaagagagcaaaacccaattcagactctcctgttaatgcgttggtgtccattctgcattgtgttctccatacatacatacatgggcacccacatgccttcacacagcagggaacaggtgaggcattcccctttgtgacctgctcatttgacttaggatgtatcatttcatgtaattccatgataatatgcttagctttctatttgcctgtttaatgactgggaaggaattgaagagattattaaacgtttctgtgaaaatcatgtcattctagtggtggaggtaaattaaatcatgaaaaacaagagcaacatggttgaaagccctagatggaagaagatggaggtgctgggtagacaggtagcgtagtgggagctcagtggttgggaggaagagacattttccttttctccgacaagctgccagtgtagtgggggtggcagatacagttgctcacaattatgctaccgtgggatatatgatacatggagatttgaccagcatctcaacagctaactcaacaggcagaggagggttcctttatagtggctaaatggcatggggcccgtattaatgttacttcagccacatactgttttttcagtgcctttttggtcaaagcaaaacaaactattgggatgcactccccccaagcaattctctgtatacattcacttgattggctcctctgaagaatagagaggcaaagcgatgtgcctacctgagaacctgagaaggaattctagtattaatggcaaaaaccacaattacttttgcaccaaccaaataactcctcagatggccatggcctcccttcctgttggacctaggatgagtcgggggagtgcagcagcggagtcatcacttagttcaatagcctcacaaacgaaccaaattgccttcttcaagttctcttagtgccggaacctgtgcttctttcagaacaaggagaagaaggcatgagtttcaagttgacctactgaaagtcttgatgtgaaatacaattattagcaattgttaaaattattaaaagtatctgtatatgcacacacacatatatgtagaaactttttgttatttgatttcaaaattaaatttctttgctatatgtgtttcattatacagacaagctctgacttgcagaattctcaaatattcttgaaaactgttgggatagattgggttatatatatgtgtgtgtgtatatatatatgtgtgtgtgtgtgtgtatgtgtatatatatatatatatatatatataaattagatatttcccatttgtcttgaagacatatatattccatggaacattaagcagcttcctttaaatgcaatcatggagatagtttatagatttcataaatccaatgcttcctagtttaaggaaatatcctctaattcacctcagttttattttatgtgtgttcttattatttgaaaaaagatagttttgttcttttgctgtagccaccacaataaggcacatttattaaaagttggccacgggccagatactgctctaggtactagaacaatggtacccatccaactgtggtggagaatgagagagttcttgctctctgggtgatgagagagcccttcccatggtggaaggcatacaataaatataccaacaaaaattaaaatcaaataccacgtaatataatatagtataacaacataacatcagttggtactagtattgggtagaagataaaaagaaagcaacgtgatacttgctgggggcagtttcagcccaggagaaggaagacctttctgagaaggtgctcattgaaatatggatgatgataaggaggttgtctcaggcatatttggggtgggggttacattgcaggtagaaggatcagcactggcaagggtgtcagtttgggaacaagcttggccacagtatctagaacattgtgaggaaacagaacagaggaggaaaatgaggttagaaaagtcaggagttagaccttgttagccatggtacggagtttgggatattatcccatgagtgatgggaagctggtagtggatcttaaaacagagtcgacattatataatctgatctttcagaaagaacatctctgactgttgttttggaggacagattgtagtcaacaagagtggatgcaaggaggccagttatgaggctattgcacttggtttagagacgagattatggctatagcatgggagaaagtaagcagtggttgcatttgcaatatgttttgaatatagacccagtaggacttatcagtaggtaaggtgtaaactctcagagagaggaatcaagggcgtctcctagaattttagctgaaacaaatagctgaatggtggtaccatttactgagatgggaaggattccagggaagagatggatgacatggtttttggagaaagaatgtgtattccatatgggacatatcaatttcaagatcctgattcaggtatctagttaaagacatgaagaaggcaagtgtatacaggaacctggatcacagaggataggtctcatctaggcatatgtgtttgagagttattggaatatagctggaatttaaagccatagatcaggagagagtgtgggcagaggacagagctccttctgtaccagagaccttgaaatgtggactatcgtatcaactgcttctgagggtagatgttgagaacagataattgccttacagttggtgaatgtttgaaaggtatttatgttacatacataaattccaattaaattatgaagtctgtgcaaaaacctcacgtgttttgttttgtatctttctagtacaacgggaaagacaataaatttcgggaagatttttctatatagtttccagaaaaatatttgtttgaaaagctaagactgatttctcaaagtgccaatattttacagcctcctgttactttaagcctgaaagctatcagcggttttgtaattagttggatttgcatcaagaactcaaaaaagttttatttgagttgttcattttgctaccactactttaaaactttaggttttgagccggaatactaatgttaaattggttgagtttttcagagcattgtctttgatgaatgcatttgaatgaaatgcatttgaaatggttgtaacatagtcataaaaggaaaattatgatgacccaataaatatcaacattccattgcttgaagaatttaaaaacatatacagcctcggtaaggtattggtgtcgtcattcaccatgctgtgaatctcagaaataaaagcaagagggattatattgctttgacctcagttagggtttagtaagaaatttttactttatcctggtaccaatttgtaattgtttaccacccaatgtagaacactaaacatgcgttatttctataatataattatgctgcatttgaagcgtatgataaaaattttgtttttatctgcaccttaaaaaaagaaatatgtgattcataatatgcgattacataagataggtatagaataaacctgaattactatttttaagtggtgctatgtataatgtatcttctctttttgagtttattagagttagattaatatgatgataatgcccagtggtacttcactggatagaaggtgtgatttccagactatgctgtaacacaaaaaatactgtcaaattttttttcttctctttaggaattttattacatttttttcttgcaaaggttttatgtaccatcaagggttatgaactttgatttgggttatatcaattaagttgccactattacttatataattcaaatttgtgtgccttcatttctcagttatggaaagtggcttgttagtatctcatagtattatttgttatttcacctttgtatcctaatgtgttttttgttgactattttgatagtatgttatctggggcataaaagggcatgcttgttacagtttaattgaaaattttgccctttgtcagtatacagtgataaatatgtttgccttgtgttctacagttgatactgtcttacttttttgtctatatgcttgtccatttatttttagctcattggtatactagtgtatcaatgctacttacttactttaatgttctaatagtaagcctttaataaaagacagatctttgtctgccctaggaaatgcatgtaacatacgttctttctaatccttacaaaaacattcagaggtaaatattattagttccagtattatggataaaagaagtgagacccaaagcataaatatgatgtgcacaggatcaagtaattaataatgatggagctggggttttaagccaggtctgtctgaccacaaagtctgccctgcattccctgcaggcagtttcataagcgatatgacactgcattacatgtagcccagtctgagaagctttaacaagataatttgactgatttacatgcattgttgtaactgatgtacttagaaacatttttatcatcttattttgagctttgttgtttttatgatttcttatactgcatgttttaatgaattgtttttaattttgttttctccattgatttggaaagtatagataacttttagtcattaaagccatagattctttgattatctttgaaaaatatttttgaaaagggataacttttagtctttgaaggcatagattctttgattatctttgaaaaatatgtttgaaaaggctaacctatatttcttttatcaaggttaacaatgaaactgtatgttttttactgcctctgagtataaaatagaatataatgaatttctttttccttctccctcactattttacagtctttgaaaatgtaactgaagggttttataaccaggttattattactgagttatgatttttagattccatatagtgtctttcaagaaacagttttgacttttacttttagtgttgtatacatatattagtaactctttatattcacctcgatgtttaactggtttagtggtcagttctcctatatcacacttttacaattcttggattcttagtgttggtacttctctcagtttgcatcgtttaatacatttattagaaaagaatgaaatgtgggttctatatattctgagcatttgcagtctataaaaatgatgtgttggatggattctttgttgttttgattaagactctgtaatgctctgaaaatgtaaaaagacataatctcagggctgttcattacaacactgtattagcaaaagcctgggaatatcttacaacccataagaaggggactgatttagtaaaccatgaaacactttttgtctgtatgcttgtccatgtatatatgcttgtctatatgcttgtccatgttctaggtattgtgcagttatgaaaaaaataattatctctaggacatatcactaagctaaaaattaacaaagtagggaagattgtgtacagtatctatcactgagctaaaaattaacaaagtagggaacatcgtgcacagtatcctagtgtttaaggaaaaaatgacacaatatgaatggaaaaatatgaatatatgtatgtatatgtatgtgtaatatgtgtatatgtgtttatacatgtatgtatgcatgttatgtatgtatatgtatatacatgtgtgtttatatgtatgtgtgtatgtgcatgtgtgtgtgtgtatatatacttcatttatctatgtatatgaaggataaaccatatgtatatgaagaataaaaaatgaggtttcaatgggggaaggaagggacagggcagaagggtagaggggactggtatagaaactagaattttctaaatatagcaaaattttgtgaaaccatgtaaatgttttccataattaaaattaaagcaaaatacaatatataatctctaaaacctgaaatcaagatttaaacgatgcagataaatttgtattaatttaatgattcaacctcatggacaagaattatttcaagtaactgtaaaacattcactgactgtcattagtaagatataaactaaaaacaaagaaaaaatccgcaaagatatattaaactgcttcgtagtaatcatttgcttacagtaatttttttatagcaatgagattggcattgttattttgagcttttttcgggtgtgtgtatgggtatatatctatactatatacatgtacatttgcatatgtatatatttgtaatataggaatgttaattgttttattctaaaatatcctatcaggcagtattctatcctctattacttatttgctttatcctgtgtgtacacacactcactcacatacattaaccgatatgtattgcattctgttatatgtatttcatatacattatgaaatttttaaaaatagggattatgttcattttattaaggaacctagagttaatatgaagctcaggattaaaaggacattctgtaattctaaatttgatctggaaatatttttgtatttagtgtaatcttattgtattttcaatttacattctccttaatttaaaaattctgtttcttagaggtaatatcatcttatgtgctattgaatttgaaaatgatttttatttttttttaagttcttgtagtaatgatatgtgaaagcttgcctccacagtaagtctttagaatgacattgtctttctcttattctagaatatttttcaaaggctctgtgttggtttcttctctttttaaaagagaattgcctaaaattcataaggattgagatagtaataaatcttaggtcttctgttgcttcaatccaattagttaatggggttttttaactgtgcatttttttctcttctgactttgagattaactagccatctagaaattattttttgaaaactcagaaggttcaatatatccttggaataactatgggtcaattctaaacccagaacaacaaattaaatttaattccctcccagaattttcattaggctttctgaaccataacttggtggcaagggactggagattattcttgttatacatggggtaataaattctctttgacaatatcccccattctgcagcttcaatacctctttgcattattgcttgccctcttgggaagccattttgaaaataacatatggctttccccttcattttgtgaagccagtgtttaatttggctgggagcaaattttacttgacatcaattttacttgtttttctttccggataaattactttgaaaggtcttttttttttttcccaataaggctacgatataatttttattaagtacatactattaagtatatattatttattaattatgtgtcatttaagttcttcacacacacatactctctcacacactcacacacacgacataacaaatagtaacaataacaataaaaatacagccctcttctgtaatatcttagggacttgactcacaagaacaacaatattgtcctttgtctttacatgtggtctgtgtgtggtagactaacaatgcttgaaaatttgttgctacttcttccatttggagatggagtttaactccactcctcttgaatttgggttggctttagtgacacgactaacaggatgtggcagaagtgattttctgagactgatgttagctcagaacaagccttagagcagcatcagcttcttcccagacctttcggaacccagctctctggaagctctgagccaccatgaacaaagtctgactatcccaagaccactggaaaaggcatggacaaggggtctagccaagaatctcacttgaactcagtcttcaacccatccctgccaagagattcaactgtgaatgaagtcatcttaactggcctgtccaccagctgaatatcaccggttgatcctggtcaataccttgtgcagtgaaagaatcacccagctgagccctgcccatattcctgatccattaaatcacaagatagagtaaaataaggatgctgctttaagccactgaatgttggagtaatttattatacaataagagataaccaaaatagcatatctatactaatctctgaagtgccatttggatatgatgactgaaacagcacattaaagaagcagcatggaattaggagcttggacatttatgttccggtattgttcctaataacctgtgtggctgagagcaaattaccttgtttctctcaactttttttttggttataaaagagaattggcctagtaataataataagaataaacctcaatgcaataaaactaaacatttattgaacgccattgtgtcaggtgctgaagtaagacttttaatccattatctaatttaaacaccacatcatccttgtaaattataggtatcactatgattattaccaatttaaagatggaaaaacaggcttggagatagcaggaaccttctcctgtatgttccataagatacttttgttgttaaccttcagtctttgattattgggtgtctatgattcttcaaattattgcttgtgaattaggatttcctttttgtgatagctcaataataatttcttttttattgttccaaaataaattttatagttatgaagtaggacaaagtcagttacataaagagatcacaaaggtctacagtacaatttatccggatactcttgatatgttgggacagtagaagcaaccagaaatgtcaaaaggttcttcttttggtccccagtcaggttgtaaggaagtcatactagaaagtgtaggtgcaccttacaaatgggaacatactagtgacaacagttgacacatattttaaagaaacagatcttggcagagaggataaaaaaggtactcctaggacaactgtcaaaccgtgttgtgtattgaaagagctagtcttcctcttaattactggcaaaaagtaaattgccctacattttctgtatttttttggtttggctttcttttttataccccctattttcttctaataatttttctttccctttatacttatatagtgtgtgttcattatcacttaaaaaagaaggaaggaaggaaggaataaaataaattaggaaaaccactaatattaattgggtgcctttaatttgtgcttgctatttcaggtttaaatttttaagcatttaacatgtaaatattttagattgatttggttttcccaagccacctgggtagtaaaagtgaaattggatttgaatccattttctaaacctgtttgtgatacacaatattcctcactatctctcatgagcctgctctttagttgatgagatttattttactttaatttgactaaccaatttttaaaaaaatcttaatccaatttaagagtgctgattcacatattgcatagcattccctggtgctttgaacctgttaatttttgttgaagtattaagaatgtctaaatataatctcatgaatgaacttgtgagtggattgaaaaatacccctaattcttttagggcttagttgcagggtgtgtattagctgctgaactcaaatttattcatgacgaagatctctttgaggcactgatggatgtatcacttcatggtatctattgggaagcattttgtatatggaattgtgctctgtgccatgccaagggagccctgagagaggaccctggttatatgagcatttcattcctttctcttgagagagggtgttggcatccttagaagctccctctttccagagcactgggccacgtggctgacttgctggctgccttcatttgatacctgtgaacactttcctttagcccacttgttctccatcggtggcgatttgccctcctcccaaaagacacatgacattttctaaagacagctgggagattcagctgtcatctaatgggtaatggccaaggatgctgctacacacccaatacatccaggacggtccctcaacaaagaattatgtggcccaaatttcagtagtactgaggctgagaaacccaactctggtttcccaatcttttgttttcattgttgctcccctaaagatccttttagacattttttccctagtaacatactcctcaatgaaatgttaatgtgcttcattataatggtttatatactgttgttttatctgtggtttacacataagaaaaataatcggttattttagctatcaagaaccagtttttgcctctatgggggtgatgtggtccctgttgagagtgcatgtaccagtggatctccttgggaagtgagaggcttgtaaataacccagcccacaacaaattgttgaatgagacagaaaaaacaaacaaacaaaaaacaatagaaaaagaaaaaacccaagaagagccgatatacctaggaaattagtaatgatgcttggaagcaaaatgtctgcccaatatagtatcagcagtcaactatgagctgtagatagaccgataaaacagattctcagtctttctcctgcctctcaacaggcaggccccctgccctggactcttcttctgcagaaacaatctatagacagggacttaatgttcacatcctctctctctgtgcccgtctcctctgtagttgatcagtgggtgaccatctctgtttcccctagttccttccaggagtcttcaaggatgcctgttccatgtctggctcatgccaaatgccaggaattccattgggatagacagactgggtcctgcccctcctgcagcctggggtatagctcggggctggttcaactctatcatttgcataatacagttgccagtgttttgataccttatgccatctccacaatttttgtatagctgtatggtaactgaaatatttactctctctttttattaaattgacacatcttgttaggtaatacatttatttaaaagggaatatttatgccgttgccgtagaggggaaccaacgtcacttgccataaccagaaggaaacaataaaaatgaatacagtggaaaaaaagttcatgagctgttattgctttctgagggctctgagcctggagtcagtaatcactcagcttaaaaggaagataagtgtgtaagaaaggtggtgaaagtatactggcatcaaactgaggctttctcactgataccgatattagcaatttgaaagataattcaaacgggaataactttctcattatttaagggagatgaatactatataattctgtatctgtgggctagattaaatcatctcatgcaccccatgaggcactcccacattttgggaaacactggtaagctaagtccagttaactctctgccccgcccttgcctgcccctcgactgttctgcgttatggattattatcaacagtcaactatgagccatttgaggcttctttttttggttgttgatggagtttcactcttgtcgcccaggctagagtgcagtggtgcaatctcagctgactgcaacctccgcctcccaggttcaagccattctcctgcctctgcctcctgagtagctgggattacaggcgtctgctactatgcccagctatttattttgtgtttttagtagagatggggtttcaccatgttggccaggctggtcttgaactcctgtcttcgggtgatccacctgccttggcctcccaaagtgctgggattacaggcatgagccactgcagccagccaccatttgaggtttcttatttctctttgggctcctagtgccaagcaccatgcttgacacagccacagtgtttctctgccacttgcgtgatctaatggacctggggctgtgcattgacctcacattggcccaggtagtgtgtaaattgattctgcgtgacttagggttgggtgcagctccatgtgtgcatgcttggtgagcagaggattcagtggatttcagcctctacctgcccttgactgaaaggcactcttttgcaagaacaatctatacaaccacacccagctgctgtgtatgacggtaaatgagatgtggttaatagacacgaagagaactttcacttcacgagttcttctcatgatttaagggtaacctaagaagttcaatttttttcaggcgtgcctttgatgtatttattctctttgatctgaggagcacttaaggagccgttaccagtaattgtcattgagaaaaatttaatacagaagaaaaacagactttatatagatatttaaaaagatgcttactaaagaccaaggagatttaaggagcagctagttcacataatcatcttatgctgtagagtaaggatctaaaaatcaatatttctttaacagaactgtgctctgagtggtgttaccttccttctctctctctcttttttttttttttttgaggtggagtttcgctcttgttgcccaggctggagtgcagtggtacgatctcagctcactgcaacctccgcctcctgggttcaagtgattctcctgcttcagcctcccaagtagctgggattacaggcacccgccaccatgcctggctaattttttgtatttttagtagagacagggtttcactatgttggccaggctggtctcaaagtcctgacctcaggtgatccacccgcctcagcctcccaaagtgctgggattacaggcgtgagctaccactcctggcctaacagacacaatctcttctgtttcttttttggttctttttcttccttccaccagtcactctcttcccctttcttcccctttccttctctcttttctctttctctgccttttccttttttaatttttttttcaggggagaagcaaatgcatcccaaagtcttaaaaatcatgcaaatatttgtcatgacactgttagaccatagctgaccaccaagaaatgaatggaagccagttggacaaggtcaaagcaggataggtcagagtcaactcttttaatgcccctgttttaaagatgaagaaacctggagagaatgaatgtcttacctcagccacactgctttttttgttttgatgatgtgtatttgtaatgtataatttgtgtcatggatcagaattgatgagggtaactatgggtttaaaagtcaataggaataagtagggataagaatgtgaagggtaaacatattctcagtgacacagtggtaccagtctgtatgtaattcagcaaatatttttgagtcatttcagcggatgatgaggctaaagccagattagcatgggtttatgagagaggggcaaaagggatactggagaagagggtgaagcaactttaaaactgaggttttctatagaggggatgggagaaatgggaaaatagctgtggtggaggagagattaggaggtgtggattcgaaagaggatttttgttttgtttttagccaggggaaattatagcttgttttatgctcatggaaatgatcctggagagaggaaaacataaatgaaataagggagtgatatggtttggccgtgtccccatccaaatctcatcttgaattcccaggtattgtgggagggaccagtggaaggtaattaaatcatcgtggctggtctttcctatgctattctcgtggtagtgagtaagtctcacatgatctgatggttgttataaggggggggtttcctgcacaagctctctttgcctgccgccgttcatgtaagatgtgacttgcaccttcttgccttctgccatgattatgagacctccccagccatgtggaactgtaagtccaattaaacctctttcttttgtaaattgcccagtctcgggtatgtctttatcagcagtgtgaaaatggactaatacagtaaattggtaccaggagtggggtgctgctgaaaagatacccaaaaatgaggaagtgactttggaactgggtaacaggcagaggttggaacagtttgaagggctcagaagaagacaggaaaatgtgggaaagtttggaacttcctagaggtttgctgaatggctttgacaaaaatgcggatagtgatacgaacaataaggtccaggctgagatggtctcagatggagatgaggaacttgttgggaactggagcaaaggtgacgcttgctatgttttagtaaagagactagcagcattttgcccctgccctagagatttgtggaactttgaacttgagagagatgatttagggtatctggcagaagaatttctaagcagcaaagcattcaagagttgacttgggtgctgttaaaggcattcagctttaaaagggaaacagagcataaaagtttggaaaatttgcagcctgacaatgcaatagaaaaggaagtcccattttctgaggagaaatccaagctggctgcagaaatttgcataagtaatgaggagccaaaagttagtccccaagacaatggggaaaatgtctccagggcatgtcagaggtcttcatctcagccccttccatcacaggcccagaggtctaggaggaaaacatgttgttgtggcttgggcccagggtcactgtgctgtatgcagcctagggacttggtgccctgtgtcctagccactccagctgtgactgaaaggggccaacatagagcttgggctgtggcttcggagggtgaaagcctcaagctttagcagcttccactctgtgttgagcctgctagtacaccaaagtttgctataggagcagggctcttatggagaacctctgctagggcagtgcagagaagaaatgtgtggtcaaaacccccacacaaagtccctactggggtgtcacctaatggagctctgagaagagggccaccatcctccagactccagaatggtagatccaccgacagcttgtatcgtgcacctggaaaagcagcagacactcaatgccagcccactaaagcaggtaggagggaggctgtgccctgcaaagccacaggggtggagctgcccaagaccataggaactcaccttttgcatcagcatgacctggatgtgagacatggagtcaaaggaggtcattttggagctttaagatttgactaccctgctggatttcagacttgcatggggcatgtagtccctttgttttggccaatgtctcccatttggaatggctgtatgtatcaaatgcctgtaccctattgtgtctaggaagtaactaacttgcttttgattttacaggctcgtaggcagaagggacctgacttgtcttggatgagactttggactatggacttttgagttagtgctgaaatcagttaagactttggaggactgttgggaagacatgattggttttgaaatgtgaggacatgagatttgggagggaccaggggtagaatgatatgatttggctatgtccccacccaaaatctcatcttcaattcccacgtgttgtgggagggacccagtgggaggtaattgaatcatgggggcagtctttcctgtgctattcttgtgatagtgagtaagtctcatgagatatgatggttattatgagggggagttttcctgcacaagctctctttgcaggatgcaaagctctctttacatgaatgcctgctgccattcatgtaagatgtgacttactcctctttaccttcccccatgattgtgaggcctccccagccatgtataactgtaagcccaattaaaactctttttttctgtagattgtccagtcttgggtatgtctttatcagcagcatgaaaacagactaatacagggggaaagacttgctggagcagcatccctaagtagacaggaggggatgggatcagtgtgcacatggaccaattggccatccataggagtatagcgagggcatctagagaaacatgaggcaagatggagtcttggcggacagatgctgagggatgtgagcttagaaaagctctcttctgtgtgcataagtgttttcagagataggatgtgtgttagtttcctaggcctgctatagcaaagtatcacaaactgggaggctgtattagggttctctgggaaaacagaaccaatagaatatatatatatgggatatatataggatatatataggatatatatgtaggatatatatatatggaggatatatatatgtagcatatatataggatatatagtatacatatagtatatatagtgtatatatatgggatatatatagtatatatatagtatatatatgggattttatatatataggatatatatatgggatacatatgtaggatatatatgggatacatatataggatacatatatgggatacaatatgggatatatacgggatatatatacgggatatatatatacgggatatatatatacgggatatatatatacgggatatatatatatatacgggatatatatatacgggatatatatatatacgggatatatatatacgggatatatatatatacgggatatatatatacgggatatatatatatacgggatatatatatacgggatatatatatatacgggatatatatatacgggatatatatatatacgggatatatatatacgggatatatatatatacgggatatatatatacgggatatatatatatacgggatatatatatacgggatatatatatatatacgggatatatatatacgggatatatatatatacggtatatatatatacgggatatatatatacgggctatatatatacgggctatatatatatacgggctatatatatacgggatagatatatacgggatagatatatacgggatagatatatatgggatatatatgtgtgatatatatatgggatatatatatgggatatatatacatgggatatatatacatgggatatatatatgggatatatatatgggatatatacatatgggatatatacatatgggatatatatacatgggatatatatatgggatatatatatgggatatacatatgggatatatacatatgggatatatacatatgggatatatacatatgggatatacatatgggatatacatatgggatatacatatgggatatacatatgggatatatatatgggatatacatatgggatatatatatgggatatatatatgggatatatatatgggatatatacatacatatgggatatatatatgggatatatacatacatatgggatatatatatgggatatatataggggatatatataggggatatatataggggatatatataggggatatatatatatatatatatatatatatatatagaaagagagagagtgaggagagagagaaggagagagatttattataaggaattggctttgcagtgatggaggctgtgatattagagatctacagttggcaagctggagacacaggatagccagtgatgtggttccagtctgggtccaaaaccctgggaagcagaaatgatggtaggagttctagtccaaaagccagcggtctcaaaacccaagaagagctgatggttcagtgtgagtccaaaatcagcaaaagactgatgtacccactccaagagattaggaaggaggaatttcctcttacttgatggagagtcagcccattggttttatttaggccttcaactaattggatgaatcccacctacattaggagaagcaatctgctttactcagtctaccaattcaaatgtgagtctcacccaacacaccctcatagacacacttagaataatgtttgaccaaatacctgggccccatggcccaattaaggtgacacattaagttaactatcatgagggcttaaaacaacagaaattgattctttcacagtttgggaggctggaagtcccatatccaggtgtcagcagggttggttcctaacgaagaatctgttccatacctctccctggcttcagggggttgctgaaaacttggcttgcataatagacacttgcctccagcctctgcgtccatcttcacatggtgtactcccatgcgtctctgtgttcaaatttctctcttctcataaagacagaagtcattgggttagggcccatccttgcccagtataacttcaccttaacttgattacatgtgcaaagaccctatttccaaataaggtcgcatccatgagttccatggttagaacatcaaacacattggaaaacatagttcaacctatagcgggaagcaaagccctcagctgagaatgagaatggggaagaggagaaggtattaaacattcatgtaaatgagtgcattaagggactacagtgagaatgctgagcagcctgaactgcccacttgggggttaaggcatgaagtgtacgttaacagccagcttggtcatgtggatttccccagacctgggcatagatccacaacttgatcagaaagtgagttttacatggttgattttcaagagagctgatgaagtagtcaatcaaagtgtagtgtatgaaagggaactgtcatgatgattgaccttggaaattaagctgggtaagaaagaccaagggacgtgagagggcgagtcacagggaacagatggcagatgaatgggctgaggtccctgtctggttgaagatggtgggaatccgtggccttcagctgaaaaactaaaagctcatggtcagggagttagatgcttaaaatggagctgtggacaagtgacctctaagtacctaagattttaagtaaatttcctaaaatcactcaactgttgttctagggaggcttttttttaatactttaaaaaatatgttttattttgtaagagcagttttaggttctcagcaaaattgaggtggaaggcatagaaagttccatatactctctacctctttccttcaaaacacacagcctcccccttgatcaatgtctctcaccagaggaccagaggggcacatttgttatgtttcatgaacctgcactgatacatcattaacacccagagtccatagtttacattagggttcactcttgctgttgtacttctatgagtttgggcacatttgttttgataggtatccaccattattgtatcacactcagtagttacattgccctaaaaatcctttgtgttcttcctattcattcctccctcccttcaaacccctggcaaccactaatctttatactgtctccatagttttgctttttccagaatgtcttataattggaatcatacagtatgtggccttctcagattggcttcactcagtaatatacatttcacttagtaatatacatttaagtttctctttattacttttaactgtgccattcaatcttattgctggaggcaattcagagggttattaattttcattacaaaaaagtaatctgttcatactggtgatgctttcttaagtcttcatcacttaagtgagagacatctctgataatgataatgtctacaaagagaaataaagcagcatgtcatttctagcttttctattgcagttaaatggttcagaacttctaaatgtaaaattaagatgctaaggatattgtagttataaatttggatcttttgattatcagtagaaaagccttagaggaatatttggagaaaaggctgatcagtgtaatttcctgacttcactgtcatcttgtattatgtataaggtggtagtgaatctgatttcaaaagatatttgctgatggatagctttgatcttgccgttgattctcgtaagattctcgttgacatctcatagcctgcagaatatagtatagttttttatgacctgagctatatcttttttttttttccagcatcaacttctgctgttcacctttttggattgtatatttcaaccaaagtagactcttgctggttctcaaatacaacgtctgctttctgcccctgggctctttctcccttcggggcctcatctgttagcatcctgttatctcacctgaccttcaaggccgtgcttagaggattcctcactaataaggcttccctttagtcctgagattctccaacattatcccatatcagaattagctggagggtgaaggtgtgggttgcccctccacacctgtgggcgtttctcgttaggtggaacgagagacttggaaaagaaagagacacagagacaaagtgtagagaaagaaaaatgagccgcggggagagttctcttttctttgtgaagggcagggtgccctggaatgggttcgccccgagagaggggcccgtgccttggaaagcgtcgctgttctggcggcgtccagtgaaacagcagttgaacacgggtcagtcggtcctgagagatgggcgagcgccgttccgaagggacaggcaatggcctcccttgccctcagcggatcgaaagggagtcgggttcagatccccgaatccggagtggcggagatgggcgtagtggagttgatggcatacgaagacgccaatcctgagtgtcaatcagccgttaagtcattaaaaggaaaggttcccgcaggctcagatgtaatctcagagtatttaaaagcctgtgatggaattggaggggcaacccaccccttcagagggcttgctaggtggcaggagacctggcctcatccccagagattctgatccagcaggtctgtggtggatcatggaaacctccatttccagtaagttctcagatgatgctgatgctgtgaatccagactttgagaactaccatgctgaaggtttgaaatctttttcttagttacattgacattttgagactttttttttccttcctaaagcttcattctgtcactggaagcataatgttagcacatacttattaagcgataattatttatcaaataatgtcttctatgcgcatacagatatgcactttagatggattactaattcccaactaactgcaatatttataacacttaaaattatgtaggacataatttaatctttgatgagtcgaccaatatctctgttctgtgcattgcctaaggtgtaccttataaacatcaatcacttctggtactctagaaaaaattaggtcacttgaactttctgcaaagactcatcaagcagaggtttaaaagatgaaggagacttcagatttgggacctgtatacgaagtgcatgtggttgtaattattggcatttattcgaactacaggagatttagccagtccctttgacttggctcttgtgttggtgcagatttggtcttgtgctgggtgggggatatgtccaatgagggactcagttgaggacaaaagggacaaggtgagtctgggcagatgggcctgtttctgagcagaggtccgtgtggccaaggagagtccagcctcttttttgcttcgtgctgctcagttcagggctaaatccaggacaaacaaatgacctacacgcagctgcctttgcttaaatcagctcagcagactgtgttctcaaacagctagataaaatctggcatttactttgtatctggcgacctttgctttgaggagagctgcttttttttgttgttgttgttgggaatcttgcatgattgggttttattataatcttgcattaaagggcatatgcaatttccaataggttagtaatgaaaatggttcagtcttactaaatggacgctatgagctctttttaaatggtatgaaaatttgagggcatcttttacttaaaacttacttttgagtagttttttttcctccaaattctctctttctttttggtgttcctgttcatcactccattttaagagtgggctttagtgttttgaatgggaagcattttcctaatgtggtataagattaggagccagaggaacccagacatccactaacatctttagaagggaatatacatggaagggctctgttttctgtaggctgggtgggctgggggctgatgggagccatggaggtccctagcctgcaggctctgtctgcgaggactggccattctttggcctctgcttgtgggaaacccaggactttcacagcttctctgtatgaatggggaggggcacagagcctcagtatgaggagacacagaattgagatcatgaggggtaagatttgttgatggtcttgggaccaagaggggagtgaaatttgcaccttctctttttaaacatttgcaaaccagaggggtgagtagtgaaagagttagtggttaaagggatcacatgcaatttctttggactgagttttcacatctgacctttccagagaggatctggctttgggttggggcctcaccctggggtcagctctgctcttcacatggtctccatgtgtcctccgtccttccttctcttgacttgtgcccggtgcatagggacggtcccacttccttcttcacatctttttctgattcctccagaccacaagagacactttccgcctctgaaatgtcagaggatgtgtagtctcgatcacatagtctagctctgtacagaatttgacacttaatggcaaaggttaatttcaatatgggtcatttaaaatgcctttataaataataaaatatatttaattggatataattagtaaacattcagaagaaatggactttttttttattgtggcttattatagaaaatgaccataaaatttatggcacagtggccaggaggattagagtcactgagaaagactacaatcaagattaatgttgggacaataagataatcaccaacaaaagaattattacctgtattttctttttcttaaaaaaaactaattgaagaaaataagctaaaatttctatatacacctttttgattaagatgccttttgacatgagcttacggggaggtttttgttagacaactgctaacgcctgccaggagggacacacccaggagatgcctgtcctgagcagctcacagcactggccttccccactgggaagttttggttctgttgtggtccctctcctgaggatagagagctctgatggggaaattgcaatttaaattcatgttcgcctcaagtatgaaagcttctatttcttttcctcagcttctgataaaataaaaatatagcaataaggggatttgattaaaataactggctgactatttttattaagtagatgtacagtttaagaaagagaagggagtaaaaactgcagccccagtctctgacttgggcctgtaagctgctgctggggctgacagacactctggaaagaggggaaggtttgtcggtggggagaccctggaggacaagtggcccagtttggggcattttgattttgagctgcacacctgtgggctcagttattgagcctctttgttcctcagttttgaccactgtaaatgggtttaaccgtagttcctacctcagagcattgtcgtgagcatttcctgagtcattatacctgacatagctctggaggcgcagctcaatagatgctagccaagagaatgactgacaatgatgatgatgatgatgatgatgatgaaagatgccaggggttcaactggatagttgttcccctagtctgtctgatcaacattttttcatatgaatcctttccttatcagaagtctaaaacaacaatctgtagaattcacccatgaataaataagtcactcatgaaaataagtcacttggtgagatgagagtgatgaaaggcagacatgttgaaatcagtgcaaataaggagggggagaaaagagatgtgatgaagaattgagagaatgagaaaagcaaaagacaacgaaaaaagaaaataacaataacaattaattatgtaggaataattcacgtaacaattatggctaactttgaagctcttgcctgatgttgggacctgggctacctgttctacttattttacccagttaatccttatgtagccctgtgaagtgcatgtattatatataatcgtccccatctacagatgaacaaactggggcttgggaggcgatatggttggctgtgtccctactcaaatctcatcttgaattgtaactcctaccattcccacgtgttgtgagaggggcttggtaggaggtaattgaatcatgggggtgggtctttaccatgctattcttgtggtagttaataagtctcatgagatctgatggctttctaaaggggaatttcccttcacaagttctcttctcttgtctgctgccatgtgagatgtacctttcacattctgccatgattgtgaggcctccacagccacatggacctgtgagttcattaaacctctttcttctgtaaattgcccagtcttgggtatgtctatcagcatgtggaaatagactaatacaggaagttaagttcacttcccaggtcatgcatctagtaagaggtggaaccaggattcaaattcaggcaacccttgctgttgtggaagaaatagagcttcttaaattctttcttcacctactgctggattctttctggcccacagtagattttttggcttccctttgttaactacatggtgaaggagaaagcatatgatgatgtctgtcgtacaaatgaaatatttgggagcatagggcttatacaatgccgtcttctttttcatgataaggttgaaaaacaatattaatggcaacagacaacatagtagatgtagacatccatcaagaattgttgaaatcaggcatgactaatctgcagactgtatgttataggaaaagatcttgtatttttaagtatcatcagcattgactagggttttcaaaatttgtaagaatgtaaggttttgaacttggaggcctggttccctaatagaaacaatgtacagcacaggctatatggggaatgcgtgctgaatccagggattgaaaatcatatgccccctgggcaaagtcagctgggcatgtgactatgagctgaggcaagcaggggagctctgagccaaaaggaaccaattaatggaggcttgcatgtggacttagggtttgtttaccgagaccattcacgggtgggaagtcaagtttccatatccttcttgtttataattcaatttgctaatctttttttgttttgttttgtttttttttttttaatttttgaaggttgtaggaactttggactaaactgtagaaatctaaatttcatgagcgtgttgaatgcagctaaggaaatataaagttgttctacatttacatgctaaatatgcacctgtttcaaatttgtagctttgatagatgttactttttggaataagtgcagggagcctgtgttgtacttgaggcagattatgggaggcagcagccgtggggatggtgaagtccatcacagatcatttggactgtaaaaaaaccttttctagtaactgcgaatcttagtgttgcgtagtctatgtttaggttgatatttaaatgtggcgaatggatgcaatgataagaaagggtcttctttgttttacagcaaaagagagtttgtttaaaaccagtggtcctcaaaaagggattagcatggcatgggctgggtgtgtaggagaatcacttattttcttctctcccccatccctctttgtattgtcttccaggatagggtggggcagtttgcctgccacttgcatttgaaaatgttttcacttcattcagttctggtctgaacaattcttttagagcagcctgtgtattttatttattatgataaagtatgtattcagtgtcttcctgattcttggaaatacaaaaatgttgttcagggagacttgcagtactttttgtttacaagctaattgactcataaacaacagcagccttgcttaaaatttaaaaaattgtatttgacaagcaaagtatgaccttgtgactttaattaatgaatcagtcacttaagaatttcttgtttactcagtgtttgctcgggtttcttggtatttgaacatagtcagaaacagggaacagagcttgattcagactgtggtatgagaatctgtagtggacttgccgtgtgtgtgatttagtagctttgtgttgtgtctgtgtcatgttctgattatttattgctttattacaaatcactcccagaattagttgctcaaaaaaacaagaactttttttctgtttgtaaatctacaatttggacagggctatgtgggccagcaggaacggctcaactggcactaaaggatccacttcaagatggcttattcccatggctggcaagctggcaactgggctgccctgttttctctccatatacacctctccttggggatgtttgagcttcctcacagcatggctggatgccaaggcttagtgttcagcaagtggaagctgccagactcttaagggttgaactgaaagggacatagacatctcctcttgaggtaggagtatcaaagaagttgcaatcattattaatctacaagaggccaaattggacggtttacctttgcctctatgagttgttcactttcataccttttagcatttatcatagtgttttatttaaacctgtactctctttcttttttttttttttttcttcatgcattttcagtgggaggaagcttggttctggggttggggaggggcaaaaaaaatctctgtaccatacagcataaataggtacacagtatatctgtggtactgacattttatgggttgggggaggtaatggggacagtctaaaaaggcccattggggggtgataatgtaaaaaatacttgggaaacattgctttacttccaagcccagatctgtagtcctctcttccataatgcctatcccagcccaatcccagcagtcagaattaattgttcactttacatttacaaccatttcatgtaattctgcattgtatttatgttggttgtataatgcttctttctctttctacattacctgaccgtgagctccgtaggtacctctatcatctacccgtggaatgtccataaactacttattgaattgaattgagatggactaagggaaagtaaagttttgtctttatccctcaggcctaccaaattgcacacacagcaagtccactacagattcttacaccacagtctgaatcaagctctgttccctgtttctggctatgtttaaataccaagaaacctgagcaaacactgagtaaacaagaaattcttaagtttgaggtctcctgagataaggaattatgtgcaagtagccttttgtgcatgcagaaacactgatggaggtcagggaagtggagcagggaaggggaagaggccagtgaaggtgctctctcctagttagctctcaggagtgaggtaagtggagcttagtcctgtgtggaaattctcagaaatggaaacaaccacccctccccatcccaactcagagttaagccacttgcagggccagggagctgaggtgtttatactttaactctgctactcattgattgagaactggggcttccagggggtgttaattccactgcacttttctcccttggctttggaagaagcttcagggcacaccgaagtggggaggcctgagggataagggaagagcactgatactaccagctctaggcttccttagcacacggtctaagaaatgtgatgactggccttttattttgaaacaggaaactcttattttctcaatgtcagtgtccctggttcaagttcagctccatgaaggcaggaaacatgcctgtcttattcaacactgcatactcagtagagcgcatgactcagtattaataagaagattaatgaatagatggctgaataacccagcagtaggatttaagaggtaggttctttattgtgtttcaattcaaaatagatcagagcaggtaagacacaagctggtaatggaacttgacagatgtcaagtgctgtttgccttcatgactcttagaaaacaaacagaccaaacacaaagtagaattgtgcctgggagtagcccgaactgcttatcgaaaccattggcattttggtgaccatgcatccttgagtcaattcaggtccactgaatttggacagaccccatgctaggtcctacccatgtaggttgatatctagtcctgggttgtttggaattatgttgggtttaggtggaatgaaaacaaataatgattggcagtggctggtgaaatatctatgctgaggtggactcatggagagctcacatggagagctcctttcctttctgttttgggctgaatagtgtcttctgagccccttcaaaaagtgcattgaggccagtggttcacgcctgtaatctcagcactttgggaggctgagttgggttgatcacttgacatcaggagttcggcaccagcctggccaacatggtgaaatcccatctctactaaaaatacaaaaaatcagccgggcatggtggcacgcacttgtaatccctgctgctcaggaggttgaggcaggagaattgctcgaacccaggaggtggaggttacagtgagctgagattacgccattgcactcctgtctgggcaacaagagtgaaactcttgtctcaaaacaaacaaaaacaaaaacaaacaaaatattatgttgaagtcccaatccccagagcctcacaatatgatcttatttggatataaggcctttacagaggtaattaagagattacaatgagatcattagggtgggccctaatcaatatgactgctgtccttagaaaaaaggaaattaagacacagagatagacgtgcactgaggaaagagggtgtgaagaaatgcaggcctaagacagcaagtgattggggcaatgcagctacaagcccaggaatgccaaaggttgccagcagcaccagaagccagaagagacaaagaagcagcctctcctggagccgtcaaaaagagcatggcactgttggaaccttgatttcagacttctagcctctagaactgttagacaataactctgttgttttaaaccacctggtttttggtactttcttatatatgcttcattgatcaatatttcaaacttgcctgtgcattccctccggtcaggaatgacattccaccctgaaactatttggaggagggtagagaggtccttcttcagatgtttggaccttttagctgttactcaaagaaagtcactttcctcattggaatgctttgacttctttgctaggatctggcgggaaggagccctttctgctgttgtaatttgctgagacgagcctaggccataactcctgtgcacagctccctatgatactgcaggcacagagccctttctgtccaaggaaagttgtatgatttcagtggaaccagtgtggccactgttaatcttcatggctgaagattgtcaacatcctgcaaaagagcatggatatttgactctggatttagaccagagctcattgcaagatggtgtccaggttgaagctatggagttgatggtaaccagtagtggtatatagtcaagcaacagaagggagtgaggcaagatgtgaacagtatggcttaggcatgtgtttagtttgaagacattgtttttaaattccaatgatatttttgtcactcacctattcattaatttattaatcaaatatacatttaggagctactatgtgccagacatttcgtaggtagtgaggatacaaagaagaaacatcatctaaacaatgtattcaggtgttacaaatgctatgaaagtatgaattattgcacaaggtacagttcaggcataaacagagagaggggttagttctaggttgggagtttcagaaaagcctttctagatatgatgataatgcccacagaatattagaattgctgtctccctagatgttggagattaattttactctttttgtttaaccttcctaaagataacgtgtagaacagataaattctgtcctccatagatggctttgcgacataatgctgtccactgagcttttattgaagtgaactctggcttgccaaagctctggcatgtcaccttcctgaccacttgaagccctggaataaaattatttttactttcttcccaaactgccaagatgatgttcaatcctgcatcaaccaaaacatattcctgtaaggaattatgtctagcaaaagtgaaatgaaagcaaaaccaaatgtgcatggacataaatatgtgtgtgtttataacatgtacgtgctatgttccgatgagcggggtattcactctgatactgtcaagctgagcacttccaattgcaaatcaaggtgcccttgggctatacttggggactgaatgaagtcccttgggacaaaatgagaaacagtccctggattcttaaattcataacatttggtctggtttctaaatcttacattgttttgtctgacttctttcattcttttgaaagtatgtttactctgttttgtttttattctctgctctgtgtcctcatttattacttcggaggaagataagcactcagggctgtttctccctctgcacttggtttgggcaggttttcagaggttgctttgtgtttcttgcagcactcccatgcgtgcgtgcatcaaagactgtcatgaagaggcgtctacttgatctgtgcctcatcttccatctaattacaaatcacttacattaaactttccataaaatgaaaacacattttttttaaattggtagaaaataaaaattatcaagaagagagcaaaagagaaaagagaaaaaaattatattcaattccacaacctgataatagctgctgttaacacttttgtatatatgtttttacacatttttaaatggttgtctatatttaaatggcagaaaataggagggaaaagaataaaaatttttgtaaatgcgtgcatgtgccagttactcttctatgtacttaatgtacattgtggggggaaatgttgcaagatgttagagaatctgggctctgacgttcaaatgcctcaaaatgaatctgccctgctatttttagagtattattggaaggtaaataacaacatccttgtaaagtaccagacagttgatgagaaagatatctttcacactcatgttgtctctctctgtctctcaaacacacacacatacacacacatatttatattaatttttcatgaaaggtattattggccttgtattattggcaaccaaagctcaggaagtacatgcgacttggccaaagtcaaatgtttggattttctgattataaaggtttccgtttcatagttctaagcgatgatgcagcagctaccttgtcagctcttgacaggggttcggaagtgatctggtatggcatgctgtcttcagaactgagccagtcaccagatgtctggggttgtgagtctagttttctttgaagcgtgtggctctggatgaccttggactcgttgcttcacttctctgggctttagtttcttcatctgtgaaataagggagtttgtctaagtcatctggaacattgcttctattctgaatattctgcaattctgggtagtttttcctacagagagttgcagggttcatgtttccacatttatttgtcagggaggatagggttaatatatctgtaagaggagatgtctgagaaggcagataggaagctgaccacaaccagatagtcagtattcatgaaaacgtaattatctgagttggaaagagacagcatttgagagaaaggaccttaggacctttggaaatgataagtaatgctaatgcctatttcagaacattttatttgtgtctgccaaacatatagcattcctcaatgtattaatttttaactgattaaaaatatgaattttactactagtttctgcctaggatgtaggaagctagagaaagcattgctttcattttaccaataagaaaaatccataccttctgagcctgtttaaaaacttaaaaaagaaaaatgtagataatttatacaatcataacttctcttgaacccatcaaatcatgtactatgatctgggatcatatagtacatccaactagactgatatatagaaaacaggggctcccaaaagaggctacaaatgaattctgactcactcatggcaaatcacaggaagaccatggactgcaatacaaaggggtaagaaaaatccagctaaaattattacatttttaaaagtcaattgtgggctagcatgagagtgtagaaccactgggagctggatgcccaaggagagtttatactaactcacaggctagtatcaagcaattgcagtcagcctttggagacaaggcaagagtgaggagagggaccttctcctagcctcaggagtacaaagaaagctgagagtagcataggaatattgaggcaataatggatgattacttttaagcaaaccagactccaccttaaggacaagctaatgctagagaaatggaagcctgtggtagagcaataaaacccaaactcaacccagttctagactagattgacttgaaaccccacaataattaacttgggcagaagaatgcaatgtaaaaatgctatttaccttagactatattggacatgatgctcggcattcaaccaaaatatatgagacgcacacacacagaaacaaggaaaaaaaattattgtgaagagaaaaagctgttgatagaaccagactctgagtagactcagatatggaatttaaaataatgatgattaatatttaatatatcaaacactattggaaaaggtggaaagcatgcatgaacatatagggaatttcagcaaagagataaaaaccatgtaagaaacagtcagatgtaactgctggggaaaacagtaacaatagcagaaacaatgacaacaaagtaaaagggatgaagaaggcctttaatgagcttattagtagattcagcacagccagaggaaaaataagtaaacttgaatataggtcaagagaaattacccaaactgaaatccaaaaagaaaaaagagtgtataaagttagaacagaccatacaagatttgtgggatactataaaatggtctaaaatatatgtaattgaaaagccagaaggagaagagagaatgggatggaagaactattgaagacataaaggctgaaaattttccaaaaataatggaagatatcaaaccacagatctatggattcaagataacactaaacatgacaaatactgaaacaagctatataactggcttcattatatccaaacagttgaaaactaaaaataaatagaaaatcttaaaagcagtcacaaacaaaagacatattacaaggaacaaaattaagaattataacagacttcttgtcggaaactagaatataacttagtctacactggaatagtagctgcatgatgctaaaatatgaacacaagttaaatctaaagttagttctaaaaagtattatttgaaaatgtacaagtgatgtttaacaacaattaaaataaaaattcaaaaattcaaagactactttccatttttaaaacttttcattttaaaataatgttagatttcaatagtgacaaaatagtataattttcaagcgtccccaaatgattaaattttgtataatcatagtagaataaaaaccaggaaagtaatattggtaaaatactattttgtaattttaggacctgattcatattttatcagttgttccaccaatgcttttttatgaggtatatgtcaatttaagatcatatattgtatttagtagtcatatctctttagtattctttaatctggtcagttctactgccattctctgccttttataactgtaacgtttttgaagagttctggcctgttattcttgacagtgtctctcagtttgggtttgtctgtattttctaatgatcacattcaggttatgcattttttggcaggactactacagaagtggcgttgtaaccttctcagtatattatatttagagacaagttatgtcaatatttctcattgttagagatggttattttggtcacttagtcaaggtaatgtctgccaggttttgccaaagtaaagttctctttgtaaaataattatcttctggaaagattctttgagacaatataaatatcttcattctcatcatatttagcccactaattttagccttaaacaatgattcatgcctgaaacattgctatagtgtttgcaatatggtaactttagattttgataatttcttctatatttataaaagtataactttactgtaaggatgagtttcttctttcctcccttctttcgtttcttcttttcttctttccctttctttccttccttccttttctctcccttcctttcctttcctttccttccccttccacttccccttccccttccccttccccttcctttcttttcttttcagtactgttcattgatattttttttagtctagggttataatccattacaaccattatttattgttactgaaattgtctaatgttggccaagttgagagctatttcaggttattcccagcgttcatccgacaagtcctcatcattttatgagcactatcttcatttctagctcaacaagatgccctgggatcatcttttgcttttcttgccccagtcctagaattagccatttatccaaggagaaggacattgactattaatttcatagggagtaatatcaatgcaacagttcagtttcaaagtcagcatggagattaaaatcatgtagagtcaaaattttacttgggaatctcttaggaaggcaccatgttagaggtcagaatttatttcttagtctgttccactcagcaaattttccctctagcattgagcaatcagatgaagccatttgaatgaattaaagggccatattacttgaaactattttttctctgaaaaataattttaatgaggtatactcgacatataataaaccatgcatatgtaaagtgcacaagttggtaggtttggatatttgtaaacctgcatgagaccatcgccacaaagctttcttcatgtacctcactctcctctcttcgttcctcactatccccaggcaacaactgatctcctctcagtcactatccattgatctatttcctacaatgctatataaatggaatcatacagtatgttctctttttttgtttgtgttctcaggataattgttttataatttatgttgtagtgtgcatctgtagtttattccttttcactttgttgaggagcattccattgtgtggatataccacagtttgtccattcgcttgatgagaaacatttaggttgtttctaattttctgctcttaaaaatatagctactgtgagcatttgtgtacaagtcttttataaggacatctgctgtcattgctaatttttcattgctagacaatagaaaacaatagaattttgtatattgattttgtgtccttcaactttgctaaactcatccattctagtagtttgcttttttttaggttatctaaaagaattgttggattgtctacaaagataatcaaattttctatgaataaagacaattttacttcttcctttccaatatggagtcttattatttctttttattgccttattgcactggttaaaaccatcagtgtaacattgaatatagttttaaggtcattgcctgtttattataacattgttgtcagttctgggtaggctttcattaactggtttattaaccctcatggattttattttcttccatttttgcatgtctcatgtctgacaatttttttttttatttttgagactgggtctcgctctgtcacccaggctggagtgcagtggcttgatcatagctcactgcagcctggaactcctgggcttagtgatcctgccacctcagcctcccaagtagctggaactatggctaattttttgtaattttagtaaagatggggtttcaccatcttgcccaggctggtcttgaactcctgagcttaagcggtctgcctgtctcagccttccaaagtgctgggtttacaggcatgagccaccatgcccggccttgtctggtgatttttgattggatgttaggtcatttaaattttaccttattggatactggatatttttgtattcctatattcttcaactttttgttgttgttagattctgttaaattacttggaagcaatctgatcctttgaatcttccttttaagatttgtaggtgagaccagagcaacatgtagtctagtgctaatttccccactagtggcactagaacttctttatttctctactcattgctctgtgactcatgagttttttcagtctggctgatgcgagcaggcaatgtaactggccctgtgtgagcaccagcactctaacctcttattctttccagtggatgttgtccagccttgagtttccttttatgcatatgctgatcagtagtcagctgaatatttaaggagaccctctgaaaatttacagaattctctctctgtgaagttctcttctcttgtttgtccccccaggctttcatctctgtctccttagctcagggattccgctgcaccctgcttgtgtttctcctccctgctctgcagcctgcaaactgtttcaaggcaggaagctgggcaggtgtacatcttacctcatttgtttcacatctctcaggggccactgtccttcattgcttcatacccagggtcacaaactgttgtttcttaacttctggttgttttaagtaggagggtcatccctgttcatgttaattcatcctgattaaaagtggaagtaaacaatattgattgttagcattttaattgtattcagtgcaacaagatactcacaccacaaggggcatgtgggaataactcagagaagagcagatttctaagtacttgttcatgtcccatcctcattgagtgcaatgacagacagacatgttgacctgtttatattgtgttatattattattctatcattcactgactcacaccctcttagttcaattttcataatttaaatacaggtaggagtcaattcagctatacttgaattttttttttttcatgagtaggtgaaatttttgttctgtgctcctagcatttggcgttttacatcaggggttgcaaattcaaatgcctaaaagggacaagcaagtaatgtatgggagtgaatttggtaaggcatacaatgactataaaaatagcaaatggtgtttagtataaacgagaaagttggcaggagggcaggcagagaccatggccagttgcagaggaaagcccctaggtcaataaggcagttgcaacagtcagctggagctaattgttaaccatgagggaatgttccttttgcagaacttctgatttttcaaaagacatggaaatatagatttcagctatgtatgtatctcaatttttgaaaaccacttcaaattttaacaacaaagcagtctgtgaattaaataaaacttacctagaggcagcttgtaacccatgtttaacaatgaattgtttaactgttcacagttagaaaaatggaaaaataactgtttacatatagcaaaatggtttagaagatgacagaaactacttaactaggaacataacacatttgtgtgtgtgcgtgtgtgtgtgtatttcaagtcagtgacaaaatcaatgaattagtgagtatacacacacacacacgcacacgcacacacacacacacacacacacactctctctctctccctctgtctctctccccactgagtaagtgagcccttcacaagccttgggggcttttgcatactccttgggcacggagttattttggttcctctcccacataatcacttgagagactctgggaaggtaaaaaaaaaaatgcttccatgatcaaagctgcatgaataaatatggctgtgtgaacatgagtattttcagttagcttaataatagccatttctttaatagatatagagcgccttttaaatttataaggatttggatgtaggcctttaaaattaaactgaaactattttgaataagacagtgactaggatgaattgtaacaagaagataaatgccaaattggtgtaggtttttcttttcttgaaatgccagattgacataaacttcataagaaggttaattcttgaagaagaaggtttaattttgtatatgcctgctagattttggagattatttgacctattttgcattaaaaaagggtcaaaggaaaaaatagacaaactcttagcatgaaaaatgtttataggttataagttgaactaatatgtaagagaaaaatagtttaaaaaagtttaaataaaaggtcattttaagtaaaagttttcttctttcatatcattacttttaattatatacaaattagttgttaaatatacaaattgtttaacagaattttattttgattttatgtcatttatttctgtgaaaaatgttagaataaatgcttaaaagcagaaatctaagaattttcattaaaaagaataagcaagatatcttattaaacgtcacaaaaaagtgtcactatggtttcttttctcatagttggagcctgaatataccttatttacaataagtggtatagaatgtgagaaaaccacaagtgagttccattaatcctttcgaatccccaaagtaataaaatgaagcatgattataaatagaatgtcaaagccctagtgttttctgtgcacttgtacaaattaacatttatttggactgaagttttccattaatctgattcacccaattgttccttgtggttctcttaagatgaacatttgccatatttttgaagctcgattagggcattactaagtcagtaatttgcaagttaaaactgaccattatagtctgtcttcaacatgcaaggatcaaccgaagattaaaatcttaatgccttccctctaaatatgggtagtgttccagttatcttataaaaacattaagcaggctttgccttccaaagatgttttatattttggatacaaaatcaatacaaaggtgagatacaaccaatttgaattggtaaaatatgtaaattgccacttgctaaactgtcagagattaatgtctgaataggggtaggaagcagcgccaactgtaaaattatacagggcatggcgattaccccgtctgcataatggggcttgatttagaggctctattttgggatcacacataaaacacccaatgcagaaagccaacctttgtttaatttgtccagggcagtgccctagttttctacaacactattcacttctttaaaaatgaataacacattttctttatggatctctgtgcacctttggtttgcgagcagtagcttttccaagctcctctattagattcttcttttgttgcctttttataatgctatttctttttgctattttaaggtgcattgtctgtgttgcacttgcctgtgcatgcaaagtacaactgatactgtttttgacatggctaatataacattttaaagttgacagatgagaaaacaggaccaggaagtacaaggccacagaactgggtatggcatataggactctgttatccagtaagagcatgtgccacctaagtgggatgccactgcaggtacactctttggctgtttcttgagaggtggaattcatttcatttggcagtacctcggagggctttgtcttagatatggataacctggggaccgtaatacctacttcagattattggtactttatcattaaggtttagtctattcaaataagtacaagattcacttttttaaaaaagagataacgttaccatgcatttctgcagttttaaaattcatgacgtctttgtaaaatttttgttaatggcttctttttattttcacaggtgatttttcattaccatatatttgtattgcaagattctcttagttgcaaggatcagacacccaattcaagcttgtttaaacataaaattgagtccactggttcatattctaggtgggtccctggatggatctgagttagacacagctggatccaggagttcaatgatgcgaaggctgtctttccatttctcaggaaatttctctgtctatctctgtctttccttgtctcagtgtggtctcactctcaggctgacttcgattgggaaggaggccagcagcagctctgggctcacatcaccccagtccacaaccctgcatgcccatctccaggacattctgttcagccagtcttgagtttcctctgaaccaatgcttttgggcagggacatgagacactcagatggtcagcctgtgtcatgttgcatattctttgtgtaaagggggcaatgacattattcagtgttgggggcaaggaactgtgactgacagcctcattcaacaaggcagcatgcagtagtggagaagcttccccaaggaaggggacagaagagtgttccaaagcagaagcaggtataactctcatgcttttaaccaccaaaaatgcaccagagccactcagagttacataaaatgttaattttgccataggaagatgtattcttatagattaaataattcatcaagcaatccacattttatttccctctttaaccatcatcttttgacagtgggcaaagaggacaaagccattgaaggtacccgttttaaaggaatcattttctctgtttcacctcaaatattttcttagtctctctctagctttgctatagaacttctcacacagatttgcagttgtcattggacttaacagtctccatcaactgtgagaaaccctttcaagcagagactaatgttttatttctgttccagctgtgcctatcacagtatttggctgcatataggtgttcagggaaggtggaatgaatcagcaggcaaatgtgtggcacatgcctgcctggctggagaagacaagctcagaagagttaggtagctgaggttgcacaatatattgtgttgaagttggaatttgaactctgttatcttcctgtctccaatttagcttttcttttttctttttctgtttatctgtgtatttatttcacttggctccccagccaagcaatcaaaggggcaggtgtgctggtccacacctttcagtctctgtttgcttagtgactgaatcaatggttgcggcatttggtttacaacacggatgggaagaccatctcggaacttccaggcagtgtggttgtctcaacctcctgaaagcagggccacttctcgtgccctcttcagaaaattgctgtgtggcagaagttggattgatgctctgtgcttttatgaatgtcttgtagagcctgaggaaaatggcagacaggggagatacccccacttactcaaacctcacatttggagcttccctcttccttcatcctgttcctctgttggccccaatttctttcccaaccaacttggcaaaccaccttcagatctcactctcagtgacctatgtggctccttccagaccactgtcccctgttggcaactccaaaccctacactctgcattgggctggaatctattaggagcaaggacagaaacttccagattacgaagtttctggaagaaatacgaagacttgctcttacttttcttttttaaattcaagtcaaacactctggaaaacttaagggcaagtctcttttccattaaaaagaagttgccctcagagctggcaactttttattctacaaggtggctgtaacaattggggttcagccagagagacagaactagtaggacatctatatttagaggtttattcaaggaattggcatatgcacttgtgggggttggcaagaaaagtccaaaactgcaaaggagactgtcagaaagggtgggctggaaccgtgggctgaagctggcatccataggaggaatattttcttcttcagggaagtctgggctgcctcttaaggtctttgaaccgactgaatcaaatttgccctaattatctagcttactctcccttacttcaaatcaactgattatggactttaatcacatctacaaaatacctttacaacaacacatagattggtgtttgaataactgggcatggtagcctagccaagtcaatgctttaaatggaccaccagagaggccagatggagtcctagtggacttgtggaaaagacactttgtcttgccacaaattccaaaacttctactgcccttatatgagatgagctgttttgattcaggcatgcaacgcacaataataacatcatggagaatggggtatccatcccttcaagcatttatcctttgttacagaccatccaattacactcttttaattaattttaaaatgtacaattaagttattattgcctacaatcaccctgctgtgctgtcaaatagtaggtcttattcatcctttctaactatgtttttttgtacccattaaccatccctgccttcccccacagctcccccctacccttcacagcctctggtaaccatctttctactctctatgctcatgagttcaattgtttttatttttagatcccacaaataaatgagaacatgcaatgtttgtctttctgtgcttggcttatttcatgtaacataatgatctctactttttaaagaactgtttttggcagtttttactgaggcgaaggtacttgtgtgtgtgtatcattatccacttctttcagtcttgtgtttgtttcataaaccataccaggtccttaaggtcaacttggacgaagcagtgagctgatctagtctatgaatcctgatttagttttctttttttttttaatatttgtggtttgttttttaaaatgatgttaccttcattaccttccacaaatattcattggacttctgaaatgtgctaggaactgttttaggcccttgtgatatgtccttgaataaaatagtttctgctcctatggtgcttttatattctactggaagacaataaagtaaacaaagcaagtatataatcttatagtggcgataagtagggataaattataggaacaataaagcagggacaaggagtaggcagagatgagtatattatgtgtgcaaactggctacacaactcatagggcccagtgtaaaatgaaaattcagtgtttcttattcaaaaagcagaagaaacgtaccattgaaggtaccaaaacataaagctgttttaaaataaatctttgtctggaatagtcctggtgtttttaaaattattatttgccatttaatgctgttctaagtaaagaaaaattaaacatttagattctgagcatgaatttacattgtgcagtgcctactttaaatgcaaatgtaagggtgggatcatagaaattatccaatttgcattttctagttcatgctgtattttgtttttgtcggaacagtgaaaacgctgcacaaaactaacttacctgtttttatctcacttcttgatacgtgcactttctctcaccactttgccttcatcttactgatgagtaaggaaggactgaaaggagaaggaactgtgtctgcctcacctttccctttccttctgtgttatcatttcagtacgtaggtggttgccttgtacagggaagtaatacaagcgggaaaggatgtgataggattccatgatcattcctgtttcttagaacaaggctaatttctttctgaacttgaagcaagttctggttccaatgcatagcctcttggggctgtgcgtgcccctgcttattcaagtcttaaatacttaccttgtactcactttgactcttgctaaattcctacatgttaagagttgaacagaattctgtctttatggggcatcactaatgctctgtgaaggtgggtggtaaggatgggggatgcacacactgtatgtttcttatccactcacatctgtgctccactgtcccatcagactttccttacagaatacaagttcaaaataacattattaagactttttttttttttttgagatggaatcttgctcttatcgcccaggctggagtacagtggtgtggtctcggctcactgcaacctccgcctcccaggttcaagcgattctcctgcctcagcttcccaagtagctaggattacaggtgcctgacatcacgcccggctaatttttgtatttttagtagagacagggtttcaccatgttggccaggctggtctcgaacttgtgacctcacgtgatcccctttccttggcctcccactttcaagatggggacattaaaccaaaggcattgaaccaagtatggagtccttctgagtgtgaggccctcctaagcacaggctgtaggcacatgaagcgaggcatgagtctgtgtttgtgtgtgtatatgtatgccggctgctttatattttgatgaggaagggctgtctcatgaggtgacatttgatcagggacctcaaggaggcgaggaagcaagacttgcaaatacctacgacaggagcagcgtgatcaggggtcctaaggcacaagtgtctttggtttattctcagaatagtaaggaggacactgtgcctggacccctacatgagaggatggggatggaggatgaaatcagagaggtagtaggtccttgaatcatgtgtggtctcaaaggccaaggtaagaacttggaatttttccatgaggagatgggaagacatgggagggtttgagcagaggtggcatggcacaattagattttagaaggatctctctggtgacggtggggcaattctctgtatagggacaaagttggaagtgatgggaccaggttggatgtcattatcatagaccaaggaaagaggggtcttagactgggtggtatggatagcagtaattgaatgtggttggattctgagcatctttcacaacaagagccaatggatgttgcatatgaaatggatatttacctgggatcctggcctaagacagcagataaaaatggtctgtcctaaagtagtgaatttcctaaggttccacagccagtgcatgaaagagctcaggaaggcagagaacagaagtcttgtgtactttttcatctgttctccttctacagtgtctagacttttcccaaaataacccctataacatcctcttccaaacatcttatgtagctgaatctgcatggattccattgccacaatttcatctgtatacagtacgttggaagagcttctcagaacataatgtcctgggtgaggtgactttaccactaagtcatgtttctgtggactctgcttaggaattgactgtctccacagtttcatctgagtgacgtcctgacaggacacagttccccctcctctgttttactaaatatctcttggcctcccctaatagaacagagtcaataaaacaagttgctactgggtttaatgtacaattgcaggacataaaagtccaagtgattaaactacatgtggcttatttttctgcttttcagcactttcagaccatgctgaagtctaaattgaatgtcttaacactgaaaaaggaacctctcccagcggtcatcttccatgagccggaggccattgagctgtgcacgaccacaccgctgatgaagacaaggactcacagtggctgcaaggtatggggcacgtggccagcaggggttctcttggtgagatagcctcaaagatgtgtgggcttgagacctatgtttcacaatggtaatcatttttaagaatgaaaatataaaatgaccaacaaaataaattcacagagtgatggtagactgaattcatatcctgttttatttttctaaatgacctaacactatcacttttggacacgcattaaagacctagggtttttttgtttttgtttttttttgagacggagtctcgctctgtcgcccaggctggagtgcagtggtgtgatctcggctcactgcaagctccgcctcctgggttcacatcattctcctgcctcagcctcctgagtagctgggactacaggctacaggcacccgccaccatgcccggctaattttttgtctttttaggagagacggggtttcaccatgttagctaggatggtctcgatctcctgacctcatgatctgcccacctcagcctcccaaagtgctgggattacagatgtgagccaccaagcccggcctaaagacctaggttttagtatatatgaataaaattgtattctctctgtgatttctgtagctctgtggaactttggagttcacaagaaaagttttgttcttaatgataattcttccctttgttctttcaatctgaataaaacatatcttgaagaatgaaaaaaacataaaaaatcaagttttctaacagttatactctccaaatcctttagggataattttgcagtttttgctttgcttcagctctcaaaatttatactaatattcatgcctcagaatccagaaaaagcattttcatttatgcaaactttaatgccaacgtggaaacaaaactagaaatgaaatgtataattttggtaagctttggattttttctcacacgatactctcttttgcttgagttgatgaatatagtaatcaatttagagatcacaaagaaaatatgttttatggatgttttatcatcagaaatttgttttgagtagtggaaataaaatcagagacaaggaaagtgcttttgtatatggatttctttcatagctttgtagatatactcctttccttgatgctttccttattgctttcgagatatactccttttccttattgcttagtgtgaaggaatcagttctcgcatagctgtggtcaggttggcgtctacagcgatcttgggtgatggtggtatgcacaaaacctcatccacattcattcattccacacatactcattgggtgctcactgtctgaccggcatagtgtcacagtgtgggcaaaacccaccagcatctttgtgggatttaactgctcactgaggggcatgggaggagaaaatctaggtaaacaagcatggttagtgagaaatccaatttgtgaagaacctgcaggagaatctttcaggcgaaagaatagggcgtactaattctatgaggtgggtggtcttggtgtgtttgggaacaacagggaatgggccagtgtacctgagaacttgagaaagttgtgatgagtggtggcgctgggggtggggggaaaagagtcttgtggtcatggcgagaagtttaggtttcattctaattatgatgggggaatcatcagtggaataaggcaagtgagctatgtgactcattttaaagtgattttaaatggtaattctgataaggagaacttccaacttcccaagagctattgtcagtggctctgccttaacaggagagagtgaatcaacagaactggcgttaggtacattacatttaatgcttttggtgaattgatgatacaagggaattataaatttgaaagtgatatgagatcaaattcgttatacattcttcaggagatttattaatgctattttgatttctgttcctatgaggaaagatggtgcctcaaagcaagatgaaatcagtagggacaagtatatggaggagaattaagtgtgataaagcctataaagtatgtttaaaacgggaagggcaaaaactacacagttttaaaataaaaatacctagcaatctaacaatctaatgtagatattaaataaatgtgtgtgtgtttgtaagagagagaaaaatatttgctagaataaaaaccatcatttttctgaaaaggattatagggttcatgtctcatggactaattttttctgtgtgctgccttaggttgtactcatttattttacttttaaaaggacgttgaaaaaaaaatagtaggaaatcagaagagtgtgccaaagagggcaagggttccgctggcctcggtatgtgtggctagctagacaaaggaaatcgacaatgatttcatttggacaccaggaagaacttctgcattcaaggagaaaaacacattccaccgggctatataaagtttatggactctccatccctagaaaccttgaagaggcgattccaggcatagataatcatgaccctggagtcaggaatctgggccaacacctcttgagggcttttccagcgttattattctatctgaaggaagaaaacctgcaacgtgtaattctccaaattgtatactattgacagaatacacttaagttttgactggaaacgtactggtgttttattctttaattctcaaagacagtgtcacttttgtgttctgagttttgttaaaaaaatctatttgaaccttgaaatgttggtttaaaatccttttagatcttccccaattttttctgatcatcttcaagaacaaagtccagtgtttcctctctgattcttgctagtaacttagctcacaagatgccagctgcagaaggaacgctctctcgggctcacgcctcccaggaataatgaacacaatgtagcccgggcccagctgcagggccagctcacgggaccctccgccttcacacagtagtcactcttttttcctaatagctcttataactttgggtttggggagggaaagaggcaggaggaagcaaaggaaagggggagttgaaaatgggttatggcgagcaccactgagaccctagctcatctcagatttcccattttctgctgatctgtattctccgtgggtcctgacgggattgccttgctaggctattcatgtttcgggcagctgggtctttgtgtgttctcctctattgctgccacttttttttttttttctggagtagagttatttaactgtacaacccactgcagtgcattaggactcttgttggagctgtttggagtatcagacgctgtgtgtgattttgctgcagcaatgatggcttgtcacacctttctcctcctatctagcaagatggaatcctaggtggcttcagcttgttagcaaacatttattgaattagtagtcattgaaaacctactgtgtacatggtattgtggaaaaaggaataaaaataggtattgtgggggatgcaacctatagccaagtagaaggaataagacaagtgcccaaataaataaatcacaagtacttctgaaacttgtgtgagtatcagaatcccctggcaagcagactcctggaccttcttcccagaaattttgactcaggcactcagcttagtggtggggaacaggagcctgcactttaaattgtaccatgtaattgacatgaaggcaaaccgtgtttggaggttgaagttctgagctgcagagtaatgtgacaagagcaacctgagtgacatgaacagacccgtaccctgggaggtggggagtgggatggaaaatgggatttggtggatttgctatggcagtccagaaagctgacttctaaggaagaactgggctctggaattactggatcagatgtgagcactgtgtgtgccaccttatcctccagcaggagctgccctcctttcattgagacttgcagggccattcactgatgtcctcaaagccttcacaaaatagtgataataatgatgaccatagtaataaaaaaaaatagctgggcgcggtggctcacgcctgtaatcccagcactttgggaggccgaggcgggcggatcacgaggtcaggagatctagaccatcctggctaacacgttgaaaacccatctctactaaaaatacaaaaaattagccgggcgtggtggtgggcacctgtcgtcgcagctactcgggaggttgaggcaggagaatggcatgaacccgggaggtggagcttgcagtgagccgagatcgtgccactgcactccagcctgggtgacagagcgagactccgtctcagaaaaaaaaaaaaaaagaaatagaagtcttaataacacagaactgacaataacacagaactgacattaaagaacaggtgttaattaatgcattaagcactcatctatgcacttttcatggcatagagccatttcatcctcatggcaactcaacggtttaagtgccaggtgtagccccatttcacagatgaactagttgaggcatagagaagttcatctgactgtcccagggtccctcgttagtaactagcagagcctggatttgaactgcagcattctgactccacagcctgtgctcccccccaccggattccactgccattgggtgggttttgtgtctatccacaggtgcctcttgaaacaggtggggcagttgtgtcatgtgattttgagcaagttgtttcttttcttcaggcttctgcacctttcataggtcagtatcaggatctcatggactatacaaaattaaaaaaaaaatgtaagggctagttgatttggcaggtgagttgttacacactccttagtggattctgagttccgtgcctaccatcccatcctgctctctttcatccagacatccaaggctggaggatttaccttgtttaattggattgggatgttatcttttcttacagaaaccagaaagcataaggaaagtactaaaaatatcatatgattttaccccagatataccacgcagattctcaaatttggttttcttaaaaaaaaaaaaaaggcactctacaatgaaaaatcatatgccttataaacattatatgtgtagatatataaccaacacaaaatgcccaccgagttcctatatggccgtgtggatgctgtacaatacccgttccacagtgcttatactgttaaagcaaaatagcagcaatattgtaacaaacaaactgacacataactggggatttagcacataacatatgtcttttatttaaaatgttttataaagtttgtaattggtgctaatttctgagcatgaggatttctctgagttacaaaagggaagtaacccagaagagaaataccaaggggaggtgtgtgtataggaacaggaaaagcaggatcattagcagttgttgacatgggtctcctgtttgggactgaatctgtctgccttgattgggagagtacatcgctgtctttccacaacatccttttcgtatggctggtggggtcagcgtctgaggtcagccctgagggttggcttcagggggttgcttctcctggcccctgaggcaaccttggatgtccgaggtgaacagggctaatttagcatgacctcttgtcttttcttttctttacttctttctttctctctctctctcctttttttttttttttgagtctcactctgtttcccaggctggagtgcagtggtgtgatgtcagctcactgcaacctttccacctcccaggttcaagcgattctcctgcttcagcctcctgagtagcttaaattgcaggcatccgccaccaggcccgcctaatttttataattttagtaggagttttcaccttgttggccaggctggtctcgcactcctgacctcaagtgatccacccgcctcggcctcccaaagtgctgagattatagacctgagccaccacccagccagaatgagatatttctttgtgctccccttcctttctgttccctcccagcctagattgaaggtgtccatgtcttgattctgcagcctatccggcagcgcttgttcctttgtcctttgccgagagtcccaccagcccctcacctaggcctgtgctcaccatgtgcttggccccatgtacccaaatcttgtctcctcttgagtgaggcacttggcctggcttgatgtgaagcccagtctaaagccgctacggtcatcttcccatttatgagggtaactgtcaaacaaaccagtttccaagaaggagttaatgatctgtaaaccataacaatttttatattgccttttttgagattccttgccttcaggtataacagtagtagtcccttagctctcaggaaggaagagattgattacagtttcatagaagggaggggagatgtttctgagctgaagactttgcaggtaacccttaaatactatcagggggtgcttgtataaaacagccagtcttagaaatgaattccagtcatccagcttatctcatgataaggactcttgatttgaatgtaagtgtatttgaaattagcatcacatgtatctgatttctacacctaaatctttgggttccgttgatcaattatgtatttaacttgaaatacagtcatgttttctcattttagacaaagggccattttttacttcttaacacaaatgaaaatattagttttattatgtgaccaccctcatcacatgcatctctacagctctttcttggtgttggccatttggggcatttcttgaatcctatgccaattatacagactttcttttgcaaagtaagtttctgactttaataccaagacagaatacaaataatattctataaaatttacatagaatctaatataatatatatatatatatattagattcaagcctgtggtttccattgatattttcatctaaattcagagtcattgatatttattttctctttattctttcttacactttcctgtaaacaaatcaaaacattcacttctgcttgtctcctcaaatgcaggaagctaaaagtttatatgagctaacctttgttgtttcagagacaagcttttatttttctgcaatttttactctttgtagacttgtaaatatttttcctctctctctcccttccttcttccctccctccttccctctctccctctttccctccctcctttccttccttttttcctttctccccttttttcctccttcgctttctctcttcctccttcttttctacttttctttcattctacatccacaagaatttattgcacactgtcaggattgtacacttacatataaacatctacctgcctctgatatttaaggaccaaggacctagcagaatcaatggaaaaggaatattttgaaaaccggaggaatctcctcgtccccagcaggaacttaagccacgctcagccttgctcctccctcttcaccctgtccagtgctcattctcctaacctccttgttccagtggagtcaggagagaaagtggatatggctccaggggtagctgaagcctccatctattgttttagtgttgatctttaaatatatgttcaaatacacactccttatgctactgctagtgtacctagcgcggaaggatattatacatgtggttttaatgtaaacttcttcaccgcaggtccaaacttacaacttcgaattctatactgtggtctttccaccaacagccgtggtggctttggcaaagctctttatcctttgtgacctcacttttgttatttattgactaaaatcttttcatactaggaattaaaacttcccagctgatacaggtgtttcaagtgaagattataactttgcctgatttatctggtttgccacatagaattggcccttgcttaatgctgttgagttggatgacagacttgtttatggggtcactcttatgattggtgggtgcagtagagctgttgtcccatggagggactctctggagatccctgaaagcttccaactacttatttccatgtgccccatacactgtgagggctatagctgtaaatcgtggtccttttactatagagaatcagatttgacattaaagcccaacttttgggcaaatgacaaatattataattttcttactgacaaaattagtctacttcttgattttaaaaactcctgggggatcagcaaagattcattagtgaaaaaatgggaaaacctactaagcgtttaaatgtatgaaaaagataatatacaatttttattcagcaatactatggaaaatatgcagtcatcaaaaattttgttgtagaaattatattgatatggaaaatatttataatgtattaagtatataaaaaagttgattataacatgttattagtatccatttttataaaataatgtaaaataaaataattatatgtagatatttgtaatagaacgctggacagatatactaaaatatgaatagaagtgatccctggataataaaactagggatacacttttgattttcctacttttttgcttatttgcattatctaaatttttaatgctgaatgagtaatactttttaaattagttttaaaaagtaataattaaagaaaaaatttatttggatgttaaaagtttgtctggaaaatttataggaaactccattctaaatggaacattttgtaaaaagctgcaagtcggtaacttagacatttatttcttctctgtgcccaaacagaatttcataaatttcagggaaagtgacgtttttccatttaacttgtgatttgtctggtgtcagacttgcctcatgtgctcagcatagtaattgtaaacctactcaaacacatttgaaagaatgacatactggtttgctgaaggctccttcctggcaaaattagtggcttaaaacaacagaaatttactctctcatagagctagaggctggagtccacaatgagcatcatgggacagaaatccaggtgtcagcagggtcatgctcccggaggctctagggggacaatccattctttgccccctgcattttagtaggctgcaggcattccttggcttgtgggtacatcactgcaatctctgcatggtggtcacattgccttctcttctgtctctatcaaacctccctctgctttcctttcttataaggacacttgtgattggacttagtgcccgttggataatccagtaatctatctatctaggatccttcattttatcaaatctacaaaaagcctttttctttgtaaggtagcatttataggttccaggggttaggatgtaatgtctttgggtggccagtattcaccctactacagatggttctcttataattggggaattgtaaaaatgcaaaaattgtcaaacacacacacacacacacacacacacaaaatgttcacagttcataatttttttttaaaaatttactttaagttctgggatacatgtgcagaacgtgcaggtttgttacataggtatacatgtgccatggtggtttgctgtacctatcaacctgtcatctaggttttaagccctgcatgcattaggtatttgtcctaattatctccctccccttgcccctgaccccctgacaggccctggagtgtgttgttcctctccctgtgtccatgtgttctcactgtttaactcccacttatgagtgagaacaaatggtgtttggttttctgtttgcagcactatatacaatagccaagacttggaaccaatccaaatgcccatcaatgatagactggataaagaaaatgtggcacatacacaccatggaatactatgcagccacaaaaaagaatgagttcatgtcctttgcaagggcatggatgaagctagaagccatcattctcagttcatcagttttttaggttatgtttattttttcttaagcctaagaaaattatttccttggaattcagaaagctactaaaaaatcgaaaaataaagaaaattgctctgtaaaggtagcatcttactcatatgttgagccaaattcattttttaatcaaaatttctgaaaaagaagagatactttaacattttatatagaatataggtttttttacacaaaacctgtggtttttttaacctgttctacacaggttttgtactacaaatattcacattagtagtttgttatcttctaatatagtgggcacatgaaacagtgtttgtaaaagattcacggtactgtcacagggacagtgaatagatacttttctcctcattttgagtaaagcttagagcataagtttgaaaacgatgtgggaaatatgagtataatatgcatgtctgagagaagtacctttttatgcagttattttccccttatgatttcctgttaagagagttcatctttgaaataatttgttggtttagttctgaaaatttagtttaattattatctgaatttatggtttatttatctagaaaaaaggttaattattccacatatttttctgggttggttttgtggataaaatatatttccactatggtagacttcatttgttagccaaccatagaaacactccacagaaaactaattaagttggtagaaattcattaataatgtgccttatggtttccagtggaaattgtataacttcttagagactctccaaagattataataacttcaaaactaaaatctggtttatacaaatatgatacttaaatataagatgttaacttttaaaatgctgtctcgagtttatatatatatatatatatatatatatatatatacacatacatatatttaaactcagcattcgttatgtcattcttattttcaatgttctattcaccttttgcattaggggaatctgtactgagggaaccaaatgtgagaacaagtctacctgctactccaagagtagtgtaatttattgtttattaaatgaaaaaaatatactttaggtacgaaagcattaaacaagatagacggtgagtgtaatcttatataaacctagactttccttgtaagtgatttttttcccttgagttttaaattgtatcaaagcaatacttgcagagatgaaaacatcaaataacagtgaaaaaaactaaacataaaatatttttagctgtctctttcatcccttctgcacacctcagtcctgcttgaagaagtgatcgtaattatttattttggcagtttcttcttgtgtttacctttacatatccaaacactacactttatcccattatgatagataatattttttagctttctgttttggtagatgtagatttaggccaataatgactatactcactctctttcctccgttttgctagtatagttacttctgaaagtttagtgaactcaatatctgtgtgataactaaagggcccatcagtgcagcataatttttatttcctttattgttcaatttagaatatatatttttagaattgtatagttttatatacacctacacttaattttccacaaatgctttatcaaatttggcgtatgactatcaatatgttccccagctacccggttatatgacatagtgtattcttcatctcctcctggggatctcaccctgagagttccttgtcctcttgttcctgagtagactctgtctctgggtcagctgcgctccttctgtaagttagggacttctctctgttgctctgctgtgttggatgctcctctgttttcttccccttttttgctttactcctgtgttatgctggagcacgtctcccagaagtaaacattgtgtgccttttatatctgaaagtttctttattttactctcaacttttcaccttttggctgggtatagaaatgtagactggaattaatttctactaagcactgtgaaggcactaaccattgacttctatgatcccttgttacatttcaggaacctgatcctatttgattcagatattaatattcttttgtatgtgactttcccccctgtattagtccattttcacactgctataaggaactacctgaaactgggtaatttgtaaggaaaaggggtttaattgactcacagttccacacagctggggaggcctccggaaacttaaaatcatggcggaaggggaaggggaagcaaggcacattttacatagcagcaggggttggggaagtgccacacttataaaccatcaggtcttgtgagaactcactatcacgagaacagtatgggggaaacggcccccatgatccagtcacctcacactaggtccctcccttgacacatggtgattacaattcaagatgagatttggatggggacacagccaaaccgtatcatccctcaacactttgcaagctttaaagatctttttgtttttggtcctctttaattttatggttacgtgccttggtgtggatgttcacccacttcatccagttaatggttgtgggcctttttaatttggagactcttgtttcttaacagttcaacaaacttaaggaaaatcctgacttgccctcctaatttgggaaccatttaagatataaggacagatgataaatgtagattaggtcaaaatatcagttttttaaaaaattttattattattatactttaagttttagggtacatgtgcacaatgtgcaggttagttacatatgtatacatgtgccatgctggtgtgctgcacccattaactcatcatttagcattaggtatatctcctaaagctatccctcccccctccccctaccccacagcagtccccagagtgtgatgttccccttcctgtgtccatgtgttctcattgttcaattcccacctataagtgagaatatgcggtgtttggttttttgttcttgtgatagtttactgagaatgatgatttccaatttcatccatgtccctacaaaggacatgaactcatcattttttatggctgcatagtattccatggtgtatatgtgccacattttcttaatccagtctatcattgctggacatttgggttggttccaagtctttgctattgtgaatagtgccacaataaacatacgtgtgcatgtgtctttatagcagcatgatttatagtcctttgggtatatacccagtaatgggatggctgggtcaaatggtatttctagttctagatccctgaggaatcgccatactgacttccacaaggggtgaactagtttacagtcccaccaacagtgtaaaagtgttcccatgtctccacatcctctccagcacctgttgtttcctgactttttaatgattgccattctaactggcgtgagatgctatctcattgtggttttgatttgcatttctctgatggccagtgatgatgagcattttttcatgtgttttttggctgcataaataaatttgcttaggaaaatgtagcttaggtatgtagagtcagtgggctttctaaaactgccatatcttggttgaaacccctgatatgttactgtcttctctctcattgattttttcctttccatttacgactgaatgttttccattatgatcaatttagtagactttgagaaggagaggcgatacatattgaaggacaatttgccatcttttcccagaaatcctctctggattgttaaatcctctctaacttgctaattttagccatttgaactttcctttcttgtatctttatttaagatgaagacagtgacacttaagttactttcaagtttaaagagatatttataaagtacttcgaacttttttgtgggagcagtactatataaataaaatactgccattcaaatacagcccccgccccaggtttgaatgtagaggtcaatgaactatagagaaaatggtaacaaataagatatgaccaaaaagtggcaataaataacacggggtcataaaaatttcataaaatcctcttttaaatatgaagggggattttttttttcattacatccctgggtgtttcagctcctgactatccagctagtagaatataaaaaccactgtaacaacaggtgcagatgtgttcctgggtgtgccagttgttcatttctttgtttttaatgaaaatatacattcgtttcttggcaagagaaatgatgtctgggcttctgtgcgtactgagtgctctaaatgagacattagtcagattggcatttatgagtcaccaggcatcttcagaagccaaatccaggaattataaaataatttactcaggaagtaatgaggataaatgaaattcatcatcctgggagccaggaaagttaccctgtaagctgaaaatcccactgaaattagttccccccccacattgattgatgaatgcattctctttaagagttgttttcgtgacacttatgagcagtgctagaattctcatgtttccacctagtatgcctgcaataagtgttagagcaggagtggtgccatccactattatggaaacactttcctattagtctattcatgaggtggtgcaaaacaggtgcttacttaccagacagctcattcagagtccaccttgcttgtggataaaagtcccttttcttctgttctcccctctttattctccttccagagatttcctaaagtcttttttacttcttggcccttccttgcagccccatccccaacaatcctggtctatcaggaacatctggtttggaggtagaaggagctccagggaaagggagcttcaggatcctcagcattaatcatcaataggagaaatggaccttagtcttgaagattaaaaaagaaagttttatgttgcaaaaacgtggtgtcttcatagttactatgccaacagaaccctaattttatttccgcttcatagcaagggtcatcttctggaagagaaagagcagagaggaagataagtcatcctgccacatagatactagagtcagtctgagacaaagagagtcaaaggaaggaaatgtgcagacctattagggcaatgcaaaaaaaaaaaatagtttatttgttcatggtcagtaaaatcctctactaggaaccctactcattttttctttttaaattacagacccctttaaacaaaagaaacactactgataattataaatgtattaatacataggctaaatcgctgtaatagttactaattattaaatatatatttttagagatagggtttattatgactattttaaaacaaatataaagtagaaatgttggcatgagctacattaggaataaacaatattgtatgtatatcttgttattatgatggatttctcttagtgtaggccaggctcttctttaacaataatggatataaaactgaatttcacatagctttgatagttttaatattgtttggctgacttcttgtcagatgcaattggatcatcagttttcaccccagaataaggtagaaaagatcatatgccaggagaaggaaatacatcagctctaccattttcttgtgtgtgtgtgtgtgcactcttttaattaccttaaatctgtcatttatttgtaggaatgtcagcaggattttattaaaaccagatttgtaatccataacttcactgcagtgagcgaatgtggactgtaaagctctgagtgatcccgcaggtgaagtgtcccatcaactcctttcccactataggatgcccaccctcccttaggatacttctaattctgtatgtgacactgattatatgacaaatggattggtggaggattccagtgtcggcctatgtattaagcattagtaacgctgaatttatttcatatttttgaagataaaaataactataaatagaaattttaatatattctgtccacaacctaggtgattctattatgtagcttccggggtggacatagcatactttggggatgaggtcctggagtaccacgctaaggacatggaggctgcttcttggctttgcagaaaagcatgccaagctcattcatgaatatctgctattgtttcaggaggagaaaatgatagactggtgtcagatatcctgatcaagatcaaaatcctctcttggcccccatgtggagggtgagaaaaactagacctatcagaccaagtgatattcttagcaaacaggtgtaggagcagaactggtatttatctttcttcattcttgggccaatcctccagtgctgagactgttcctccttattatatcaagggagagataaggagagaactcatcatcatttgtgtggatgttaaagacattaaaatgaaatgtagcttgtgtagctttggccacggtctgagatttattgacaactagcagccagttatgatagccaagatggttcattagctagggcagactctacattcgtagatcaagatttctttgtagaaaggaaaagtgactttctcagtgctgggatattcagatttaggaggcttttttgttcgttgtttgttttttccttgttcagtagttcacagctagaagagttcacatgttcctagaggataaagatgctaagatcagcactgtgtgaaatatggaaaatcttagattctgtgggtggggcaaaatgtattttcattgtatttgtaggatagattcttcatctagctcattaatctgtagtcgtttgtctttaggctgcagcatttgactcattcatgattgtgccatcactgtgaaggaagtgccatttgtgacactgtatccctttttctttcttttaagtgtagctaaagacaggttaagtgccctatcatggtgaagcaaaactaaaaatacatgtattccaagggagtgtttggtcaagggaagctcgcttgctcgctcgcttgctttctttctttctttctttctttctttctttctctttctttctttctttctttctttctttctttctttctttctttctttctttctttctctttctttctttctttctctttctttctttctttctttctttctttctttctttctttctttctttctttctttcttctatttttttctatttatttctcttttcttcagtaccccttttctcttacttctttcatcccctgtccattacccctctgtgctcttttccccacccgctttccatttttttttcctccttctacattcgtatgtctcatctgtccagcaaaagcactgatggttctttgatttgatgggtttaagtaacttgtctagccccaaacaaatcatttcggtccaggaagtgaaatacactagctggggatgtttcttctgtgatggagccaggcatggggtctgtttgctcaaactatgtggactcccaaagggaaatcagatatgttgggaatgaagaagtgagggaatgaacactggagaaccaaaaaattactgtctacaacaaatatgatccattttttctgaggagggagtccttatacatatacattatacaccatgagaccacaatgtagaacattagaccttgggccactgggtatcttgtttcttttccaggcttggttcagtgatcacccaagtcaaatgggtattttactgagtactagagggaacgcagggacttctccaagacgttctcggtacctatattgaagagcagggatttcaatcagattttggtgatggacagatagaagagggaaactgcatgagttaaaatttagtacaatttttataagcactgagtgtttttagagcacagtttttacagcagatgtgctagcttttacacctggtgatgtgagtatcactgctgttttcttcccccttctgagggtccaggagagaaggcagggtctgctccctgatttggcagtgaaggctgcatatcagacagtggaacctgcaaatttgctgttatttatcgcctagggatccaggaacttgtttgcctttctctaggaatgtggtttctccattctaccagctaagggtccagtgttttctggggaacgtagtgtgaagggaatctatacccctttgttttaatttggccctctttgaacatctgcacaaagcaaaatcttcacctgttctacgtagggaactgtcgatgggtttatttgtcatctgcacagtctctcttgtgaatattccagtgtctcaaacagaacaatggggagttcattcagtctgctttcaatggccttgatgtgtgtatgtttaaaaattagccaagcaaagtgcttcatttacagaaagcataactcttagtgctggtttatggagcttaaattacatgcataattgaagcagatgcatttgacataaattcacctattctgtgcacttctaagtagaagagtctgcttatctttattgttactttatttatttttgtaagtctttcagcacctagagattgatttactttacagtgcattacctgccttcaggactttgttcatttctttgccttgattcatgaaatattttattgaaaccattagtatctaattggaaacatcagattgaatttagtgtccttgatttgaaatgtagtaagtattaaacgctagtcctatggtaagagataaatgtcatctttactgtgagaaattaacttaaatatgttttatggtaaagagtgataaaaggataagtagggatgctctattttccacactcaggacctcaagtcctttttgttaaaacacacatgtcacaattaagctacttactcatacaaatgagtgtagcgcatttgacagaaatcattctattctctctgctcttttgttcctgggatcctctcaaatgtattaagcagagcagctatttatgaggaatcagagaactgcattcctcaatgcggtttattttacttgaaactgataatgtatgcagagattttgtgattaaagaaaatagatcatgaacttgattttattagtgttcttaaatgtataaaaaataaaaatagtctctcatcttccctttgcatttctcccgcattatgatgagcaaagtaaagcttagtagtaggaaatacccccttgccttaagggagttggatttttctgctgcatagactttagtttatggctcatttctccaagagaaacatgtttaccataaagatacgtggtaagtattggcatagaatatatgaacctgctacttagtgttctccatcagtgctgttgtccattacggctgtgaatagttttaagttaaaggagggcagagaatttcaagagaagatttgtctgaattttctcaggggatgacatagcactaataatttcctttgtcaatttgtgtccctgaggttctggataactagtcaatagattgaaatcaaagagagaaagtgccgttccttaattgatttttaatggagggtaaacagttcattatccttaattcagtaaagagcagaagttattttcatatgtaggtaacttgtttagaggcattaatgtatggctaagtttgagagggggaaaattacacttttaaaacaattatctttgtctggtaaccagtgaaataccagaaaacactgttgtaccagttacatattgttgcataagaaattaactcaaaattaatggcttaacacagtaaacattatctctcagtttctgtggttcagtaatctgagttcaggttatctgaccacctgtgtctcggggtctctcctgaggttgtggtcaagctgttggctggggcattggtctcatcagaaggctcaactgaaggagactccatttctaacctcgttcaggtgattgttggtgggacccaattcctttcaggttgttggactgatggtttcagcttcttgctgcctgttggccagagatttctcagttccttaccacaaaagcctttcctggagcaactcaaaacgtggcagttggctttcatctgagcaagcaagtgagacagcaagagtgagtgagcaagacagacaacagagtttttttgtaacctaaacttagaagtggcatcttagaagcaagtcataaccaaatccatcttatactcaaggcaagagtaaaaaggcgtggattttaggtggtgagccaccctaacattgtcagaagccatcttagaaactgcctactatgtttactgaccatgttttcagacctcattccattaattaatcaacaagcacaaattgagcatgttgctaataatctgagttctgcatgtcacatgattgctcttctcccctcttaaacatggcctgtccttagcttcaagtctttttttctgcccccaggttccttctggacatgacatgtttttatgccgtgcatcactccccatccacacatccctcagtccagcgctgttttggataactggatgtactgaacagtggtttttctatagcctcaggttttactgtaattttatctgaacctttctatacaatactttgcatcagtgccacccagggagaatgctactgttttcatacaatagtctatctgggtgtacatttgcagaccccatagctctcacttcacagctatgatgtatcattgtttttctgtaagtgtaattctgtctctatgaatttgcctattctggatatgtcatacatatggaattatgcaatttatggcctcatgagtttggcttttttcacttagcataatactttcaaggtttctcactttacttttacatgccatttcacgaatgcatgctagtcacaggaagaattgaaagacgataacttgaagcatatgccccctgaatggtggacaagagcattgtcatctctgcgggggaacaaaccacgtgaacgatgcaaaacccaagagaaaagcaagtggaggctttgccagtcaagttcatttctagattagcctctactgagacaagacccttccacttcttccctccatcattccctccttcctttctcacatctttccctcctcttctctttcccatctcctcttatttttgccttctctctcttattttctcctcttctttattccccatcttcgtttttcttctttgtttcttcattctctcttatgttccctttgtgtgagggcagaactaaaataggttagtacataaaatttctatttgtggggatttatcccacggacatagtaaaagtaatatacattaacctgtgatcaggtgaaaagttcaatatattgacataagagatcagctaaaataagtatggcatatctcttggaaagaatactatatagtcattaaatcatgcttaatactgccacatgactctaagattttaataaatcaaatagtattacatgtactctgcattcatctttatgccaaaaaaaaataaggtgatacccttgaagttagaacagttattatcatagtatgggaccattcctggtggcttttatttttctttgtactttttttagcttcaacatttttcaacaatgttcacgctttaacttttggaatcagataacaacagtggccaggtgtggtggctcatgcctgtaatcccagcactttgggaggccaaggtgggcggatcatgaggtcaggagttcgagaccagcctggcccgcatagtgaaaccctgtctctactaaaaatacaaaaaaaaaaaagccaggagtggtgacaggcgcctgtagccccagctacttgggaggccgaggcaggagaattgcttgagcctgggaggcagaagttgcagtgagccaaaatcacaccacaccactgcactccagcctgggtgacagtgcaagactctgtctcaaaaaaaaaaaaaaaaaaaaacacaggtagtaaacattgttattgaaagaatgctagtggaatagttcagtctttggcaatgaagccagagatcggcctttagtataaaggaagatcattaggtgactgatggttctcaaatgggatgattttgtccccacgcaggggacatctggcaatgtctggaggtacttttggttgtcacactagggaagtgatactagcttctagtggacagaggccagggctgctgctcagcattttaaaatttttacaatgtatccttctctccctagttaagaattatccaactcagggaggtgggagggatagcattaggagatatacctaatgctaaatgatgagttagtgggtgcaacacaccaacatggcacatgtatacatatgtaacaaacctgcacgttgtgcacatgtaccctaaaacttaaagtataataataattaaaaaaagaaaaaaaaaagaattgtccagctcaaatgtcaataattctgagattgaaaaacctgctcattggctggtttaaatattttaagttatctcattggctcatatcaatggaagaggtcaaatcagttgagttgtcgatattgggcatgaagaattaatttactttcaggtaacctgtaacaatatgctgacctaattatcgaaggatttgagatgaaatcaaacttctgtactcttacatctgcaattcacatagttttcatctgggttgtgtatctcaaagggaagaagccaggcaataaatttgaggttagtctgttgatactaatttaggtcacagaattccgtggaagaaattggtaaaggtgattgccgtaggaggactactcaagtcacagggaatgaagagagttctggctgagggaatagtgccacctactgaattgtgtttgtgttttctacaggttctaatttatgcaggcttatgcctggaagtgttactttcctttattgatcttgcacatctccttaagtagtcactgccagaactttaaacaatatttagttattatcggatcaaggtgtaattagaaacagctgtgaacaattgcataccatccagctcctgaagtagcaaactaaattgtacttggccttggattgattaatacagattgtgtctagcaatcaaaataaatccgtctccaggtagagtgccaggagccatcttaccaagataacacagaaagattaaaaatgcatgaaatgcaccatttcctaatgtcgccaggttaaaaaaaaattaaagcacaaagcattggctacaacaaaattgtcaacatttttatcctttttcaaaatttcagccttgatctttactttgtgtatttatgaaagcatatttagaattctctcatctttcgcctaagtatttaaaaaaaatctctacagtgcagtgcatacattgtaatatacctatttaataatgacagcatttttagttaatttgaaaaatcatttggaattacatattgaattgggtgggtcagataatttgttaccatggtgaatctcttcattggaattaaagagtttgtctcataaaattatatgcctctgtgtaatatgttaattaatgctcctaatcaaacatttaattacataatgagcctggattaatttgtaacctgaatctaaaagctaattcatataaaattcaaaatagtatgtatgagagagaaactaagaatttctagcacttgaaactttgttttgaagttctagcaatccaagccggtaataagcagaaggacttctggccagtttcaaggccagaaaagccggcagtgatagtgacaccgaaagctggatctctcatgttcttatgctgaatcatgtggttcgaaaggcagttttataatgtcgactgttttctctgggatcgtgatagcccatcctgtaagtacaaaggagccagagcttgaaggggaccccttcttcctgatgtcacacatggaacatagatggttgtggtcctcagaagctcattggagccatgaccccaaggagatagaacaaggctttgtctattaattctttatcccctgagataataagtgtatccttcctttcttatagccaattttaagccttccatctcccagaagtgagcagtctatatacctttaaaaggagatggttctaccacgtgccatcatctggagtccctggaaacaaagaagtgaatattcaagaaaccagatgcgagaactataaagattgttactgtctacattgctcttttctaagatagcttaatcctgctctagagagggtttgctcccagacagaaggatgatagtactagatcataactaatcttctgcccaccctcatgtcactgttgtttaacaatgactgatattgagataaatgaatatttagcacatctttccaccgagacggagtcttgttgcatttttcacaaaacaaacgcttttaagaagtgaacgttgcttggctgatcttcatcatttattcaagctgaaatcttggtttttaatttacaaataggattaattactgaaattcgtatctagtgtgaatatttgatgatgacttttggaacaatggacattttgcctaagctatgaaattaattattaatacttctaaactttagccaaaatggtgattttcacatgtggagattctttactcttttcacatgactttgttctcatagaaaaatgtggctggccatggtggctcacacttgtaatcccagcacttcgggaggctgagatgggtggatcacctgaggtcagaagtttgacacctgcctggccaatgtggtaaaaccccatctctactaaaaatacaaaaattagccaggtgtggtggcacatgcctgtagtcccagctacttgggaggctgaggcaggagaatagcttgaacccgggaggtggaggctgcagtgagctgagatcgcaacactgcactccagcctgggagacagagtgagactctgtctcaaaaaaaaaagagaagaaaagaaaagagaaaagaaaagaaaagaaaagaaaaatgtagtatttatttaaagtgtttatgctccgatgttataggctgtatcgtgacccctcagaattgaagtcttaaccctcagtacctcagaatgtgagcatatttggaaatagagtaactgaagatataattaagttaagatgaggtcatattggagtagggagcgaccttgatccgatatggtgggtatctttataaaaagtggaaatttgggcacaggcgtgcacccagggagaatgccatcatgtgaagattggagttacacagctacaggccagtaactgccaggagctctgagagaggcccagaacaggtttttccctagccctggcctgccaacaccttgagcttggatttctagcctccagaactgtgagaaaataaacttcatttctggcagacccaggaaataacccatcagacattgcagacgttgccactgagtttagctaacactgggggcatctgctttgtatcagagccgagctaggtgctgatgacgcaagatgaattaagccctccaggaacacagtctagtgggggaggtgaacagacatggattgagaactttgacgagcctctaaattcatagtcaccagcttcaactagacccatgaaactgcctgacaagcctacgagtttcctcattaacttgctccgccacatccctcagtggctgttcaaatcaccactcaacaaatgatcttttcctatctctcatgtggtagttttaaaaaataatttatttaaagacttttctatgttttctttaaaaaagtaaactcagaactttccagaaaggcagagtttccttttcttgctgtcactgtcccccaggcatcactttgcgccaagcttctggtctctgagaagcgctgggacttgcacgttctgcagtgaaagttctgcctgccctgagaatgcaaggacgggtgtctgcagcattccaggtgggctgagggctgtctggctctccagacaactccttatcaatgctctttgtgacacagagagttagtcaaagttgtgattcaccagtttaattacaaccaaagttcaagtgtattatgtgtaacagcttttaacgctgttcagtaaaagcgagctgagatttattctggtgataaagctgaacaagtacagggttgccaatggctctttaagagctaagtgtccttgagaaatgtttctttcttggtgtgaccgtttcagtttctgggtggagctggtcatagcttctttgctataatttgtgtgagcgatgttgctggtaagttgccatggttacttgaacccactgggcagcaggacagattttcattataacgaatgtgaacacgactagaagccgtgggtgctagtctccggaggagccacctcccttgttagctcatgcagtcagcccctgcccagtgtacatgagcaagagaaacatctagtttggttctctctgctcatcttagggaagaaaccatgactaatatggggggaaaagggacaaatagattgttgctagaaatgtgcttcttgatcatacttgtgcataactactcttctgagatagtaatgataaatgctttctaagcaatttggattcagtttaatatagttatccagagcccaatatgttatccagttgaggagaactgccaggcaatgaaatgaaaattaagatacttattaccatagtcacatttaggtttgggtgtgtaaaagtagctgtgattgctgatatggaatttgcaataaatgagcctctctctctctttttttttttttttttgagatggagtcttgctctgttgcccaggctggggtgcagtggcgcaatctcggctcactgcaagttctgcctcccgggttcatgccattctcctgcctcagcctcccgagtagctgggactacaggcgcccgccaccatgcccggttaattttttgtatttttagtagagatggggttttaaatgagtctcttaaggaggcatcacagcctggtgggaaactagcacaagtgtggtaggctttggagacagcggggcttgggctcaagtcctgattctgtattcaccaagctgtacacagttgtgtgcctcagggcaaatggttcagtctctctaagcctcaatttatttatctcgttatttatttatttattaaatttttgtgggtatataataggtgtgtatatgtatggggtacatgagatgttttgatacaggcatgcaatgtgaaataagtacatcatggagaatggggtatccatcccctcgagcatttatcctttgagttgcaaacaatccaattgcactctgtattttaaaatgtacgattcagttagtattgactatagtcatcctgtcgtggtatcaaattgtgggtcttttttactctttctatttttttacccattaatttattcatctctttatgataagaataccaattttacagggaataaataaggattacagaaaatgaacataaatgccctgagaaataatagacattcaatgcatggtggttagcttgtttattttttagattttttttagcttaaaaataaattggaatgaagaaatcctcatggttctttgtatagcgtttgtctaatattcattaaatagcttagttttttcaagtgttgttatctggtgtaagtcgactatattcaaattaaaaaaacctttggctttgaacagttttgttttcgtatcaaagcaacaaaagtcataaataagtccatttgtacatttcaacttgaaacgcttggagttttatacagttatacccacatcagagagcctttccctaattactggaatacaacagctagttggagggagaaaaggcagtgtcactatttggaccaagatttagaaatattttttctatttaggtttttagaggaagtttaaagcaaatgcactttctaaattggattatacttggaataagtgccttctgagaggttgcaaatgtcatcttttttcctgcctccctggaaatacctttagctgttgagagcacttgaagtttgggggactctggtacaaaatcccaatccatttacctttgcttgaaggcttgtttagtaatttccccctaaaatctcgtaaggaaaatgccctgggggaatgggagacacacacagccctgccatctccctgcacacaaagggcttgtagctccatcagcagcatctgcacagctgaaggaagcaaatgttcttgaggaagatgagctgcatggtggctggacaaagggaagccaaagagcaggtatttggcagttttcccagcactgcctgagagagagagacagacagacagataggaacacctacagacaggcactgtctctgcatataggtgttttccagtcaaatagttcattattctttttcgtgatctagaactgtagctatcaagtggagaagagtgtgctttagtccctctgcaacatttggcaatgtctggagacatttttgttcatcacaactggggaagtattaatggcatctagtgggtggaggccggggatgccactgtacaacctctgattcatgggaaggccgtgccacaaagaatgatttagcccaaaatgtcggtagtgacaaggcttagaaaccttggtcacttggtctagagaaaaagcaccccttcaggctgtcctatgtccttttctctgatcccctctactcagaatatcaccttctgatggcttgtatggcagtttacacagcttgagtcaaaaacaagatgtcctagctggtggccgataagtttatagcctctactggaaataaaccggcaatcttgctgattcacaggtctcttacaattcaagtcaattctcagtgtggccagttttggatccctgaaaaaaatgtagtaggaataatcataagtagatacaattattaggcccactttgcagaacagaaaacagagaggttatgtcccagccagcaagagagagggggagtccccaaattctttcccctttcctcctggacacacagcttaacaacatttcctactttgtccttggcatttgggtgtcctaaatgattgagatctgagcaatgaaatgtgggcagagtggtgaattcctagtccaagcgaggcccattaactgtgctgatggccttttattctctctccccgctggcatccaaatagacagggctttgaggacttggggaatggcggagccacagactgggagaagccttggttcttgacttcctgcttggaggagcctgaccagaaagcttcgccttattagagtgttgcatgagcaagtagtaaacttagattgtgttaagccactaaaatgttgaggtaagtgtgaaagaagttagccttctctgactaataaaacaatgaaatagacaagtgtacacatgaggtgacatggcttgtggctagctgactgggattatgtgaagaaattcactttgatcaaatttgagcaaaggtacgaagaaatttacaaaattgatgatgctctgaaaatgctgctgtttttatttgtatgtactctcttctgaatcatgtttaagaatcagagtatacattaaatccctttatcagtattttacatgatggaggaaaggttatttatctcacaggcagccattttagtgatttcgggttcctaaaccatgcatgaagagtcattaattcacatattatctcctaaaagctaagtgttgcatgtgagtctgggacttagctgagaaatgtgtaatacacagggtttttttttttgccagaccattcccagttggttgcacatctcaggagccaaagcttattactttccaaatggtaatttaaacttgttaaattacctccagacctgtcttttttgtgtagcacaatgggaaaaactcagtgccttggctccaaatgcatttttaagaattcctctttctccaaaagcctacctcctttgggactgcagcatcattatttcataggaaatttgggcaggagcatcttttaatgaaaacttttttgtttttgtgtttttaaagaggcatttactgttgcatctggcaagtggtgtggctctttctgggagtgttgcaaactcgtgatgtagtcacattttaggatctttgcgggatggcttcaaggagaaattaggctgtataactatgcagagaattgacctggtaaacacattagaggtggattatcctctattgctctctaagtagcacctgaggaatgtacaatccatagctattccagaacctaagcaggaactttgttgccgagaaacagaagcttcatatttgctcaacatgctcaattttcttcaatggagaaagccttctgtggtacaccagctgcctgcatgaaggctaggctcccacaagcatgcattgcacgtgggaaaatgtgcatgaagtgttcatatcaagtatgaaaaacatgcaatgttccatattaaaaactttaaggaatgggaagattttcagcaaaaccgtgtatcctcatcttttattttatttgtatgaatgtgaaactccaatgaatgtactaggacacaggaggacaaggagggaggaagacatttatgtacttcagtgtagtaaactctgtaatctgaacagttttttcttgatgtttttgtcatgttccaagcagcagattctgcaacatggtctgaccaaattggatttgggttgttagttgcgtcaataattaatagagaagaacttttaagtatgttgaggaagaacaggactgaaaataaaagcaggttttttttttttttggctacttgaattagttaggtggaatgttatgctgcagtaacaaacatccccaaatgtctgtaaccaaaaacaataaaggtttatttcttactcataccacatactcattgctggagggctctgattcatgtcatttctactctgagacccaagctgatgaagcctcttccatttagaatgtcatagaattcagtaacagtggggaaaaccatggaggcccacacatggattcttcaacactatagcaaaaatgagacacacatcatttttgctcagttttattggccagagcaagtcttgcagcgaaagctaacttgaaagagtaaagtctgatcatcctgatacctggaataggacctcgatattggtaaatagtcatacacatttcattgttgcataccaacagacacacactcacacacgtatagacatttagccttaagttcaaatatgaaattgaccagaggaaaataaagacatctaattcgggacagttttagaattgtagctcagaatagggagatacacagtgaataagattcttttgctggttaaggacttgttagtcaacaggtagtagaaatgcattcaggggtcacttgtccacccagactctgttacaaactagcacaatataatttgaactgagaatatttaatttagtcttctcattaaaaaataaattgaatagagttcagactaaattttgacttaaagttttttttttctttttgaacagcaggtcaaatatcagtgagaaatatgtccaaggatgtgaaacattgttactgaatcccattttcaaggtctgttgagtagaataaaggcaaatatgaagtgtgagaaaaagactttaatttgtgattagggagaactgagggtggtactatctgattttattgccacagatataatctcagttctttcttgtttataactgtttacaacattaagataacctcttagtgttattttcattttctctttcctctaactttttttttagttttctttacccaaaatagggaaaatgccagttgccttggagaagttggaagagacaacacagcaataaaatggagttatcccaggttgtgggaaggcaggacagatggataaagtatgatgaggaaaagagattggctaatatccatctaatgcagctaccaacaaaaacaaaacccctaacttcccttttgaaactccttgttaggtcaaaaagaaaataataaaattaactcagcatgatgcctgaagagtaaacatttcattctactttgtttttgcctcaggttttaatttatcaaacacatacagagaaggtctctcgtgctgccttccagtctcgccatattttaacatatagcagaacctaacagtgctctgacctgccaagacagccttccctaaagcaggttcattacccagcattagcctactttgtgcactaaaatattgaagaaaatatttgcaaataatgtagctaataaggaacttgtatccagaatatataaggaaatcttacaactgaataataaaaaaagaaccaactaataaatgtgcaaatgatttaaaaagacattttgcccaagaacatatacaaagggtcaataagcatatgaaaagatgatgaacatctttagccattagggagatgcaaatcaaaactaccatgaggtactcctttatacccacttgaatgaaaaagacagataataacaagtgttggtgaggatgtgtagaaagtgaaacccccaaacactgctggtgggaaggtaaaatggtattggcattttggaaaacaccgtggtaattccttaaatagttaaactggagttaccgtatcacccagcaatccactcctaggagtacatatccaagacaaatgaagacatatgcctgtgcaaaaacatgcacaaatgttcatagtaacattattcataatagccagaaagtacaaagaactcaaatatctatcaactgataaatagatgaacaaaatgcagtatgtccataaaatagtctattatttggcaatacaaagaaatgaagcgtggatccaggtcacaacatagatgaaccttgaaaacatcatgctaagtgaatgaagctagtcacaaatgaccacatattatatgattccatttacctgaagtatccctgaataggtaaatctgtagagacaggtagattagtggttgccttaggctggagtggggcctggtggtaggatggagttgctgctaatagataacgagtttttttttggagtgatagaaatattttaaaattagattgtggtgatgatcacgcaactctggaagtaaactaaaagcaattgaattgtatattctaaataagtgaattttatattatatgaattttatttcaataaagctattttgttaaaaacaaaaaacagtaaggtagatttcactcagctccagtaccgaaacataatgccgcctgggagggtttgctagctcagtagtttataatgctgtacagcgggttccagtatctgtccaaggaatgaatgacagctctttactgttccaatgatcaacttttggaggcctttccctgcctccattccacaccacctacactgagatgcctcatttcttgcttcttgcttcagggcatagggttggctaaaagttcatgatattttctaataaacttgtttgaaatgctgtatgaaagtcctcaatcctgatatccactaatgacgatagtaggcctgcttcccttcagtgtgttccacaaatgctggctacctgcttgaacaatgtaaatgactggctgtgtgatgctggaaccacctagagctttatcaaatctgcctgccttggtgtggtcttggtctcactgtagggggacacacacttgcagggtcaggcgctgtgtccctggggaaaagctgtaaaaccccagggttttacagggaagagaaatgtcctgtttgggattccaggggcaaatcattcagctattcctgggttcccttatcctctctatgcaatgcccctggacttttccctaccagagccccacggggatatgcctgctaaggccgttaagccaaatattgtatggactatatttagttaaacattttaggcacataatacatttttgttgaatctattgttaatggtgtaaaaaccatctttctgccactttttacaaaagagacctgaactactgtacattataaaacctttttcattaactttttagtagagaaactcttcgcctcaaccaggattttctgtaaactataagaaaagctattactaattctcttaagatgtttatgaaaaatttatttttagtaaaagtgacagtccagatattttcatagctcattctctaactttattcaggcctcttctagaatgagacttttttcgcagacttcttctctgatcaccctgtcaaaagccacagggtccctattactcccaatctctttgctctcctttgattttctttatagccataatcactctctgttttctattgtattatttctttattgtttatctccctcatggaatgtaaactttattagaaaaggaccatgtcagtcttattcactgttctgtccctagacctcgatcaagtgtatgacttcttgtaggtactactcaataaatatttattgaatgaataaacaaatacctcccccctccatacacatactcctctctccaaagtataatttgagaggagagcccgacagaatacatagcaaatgaataagcccattttccaatagtagttagtcattacccagcttctaaaaacctagggtcatgcagaaaaaagtggagagaatgtaggagtttgtaagagcactcttatccaactcccttttctgattaggagactgaggtcccaagtcacgaagggacttactcatggtcagaacaaaattgagtgacagagcaaagactatagcttggatgaagtgcttcctaggcacatggttcccattgtcagaatgtgtagaacaaaagttttattgcaaggtttagcccttgcaatgaatttagtatgcatgaggattatatcataattataagccagatataaactagggagtgttgcttctttgaggttcaaaaattactgtctgagaccccatctcccatgtggtactcccaccagagatgaatgtgcaggtgtatggacaggtggctctatattctatgtgtttctcagggttctccagagaaacagaaccaataggacttataaccaatacaatatatcattgtgttagtccattttgtgttgctgtaacataataccagagactggttagtttataaataagaggtttatttagctcacagttcttcatgctgggaagttcaatgcgcatgatgctgacacctgtttggcttctggtgaaggcttttgtgtagcatcatatggtgggaggtcaaaggaggagtagacccatgcaaagagggacaggaggaggaaccttgctttataacaactgcctctcctgggaaccaacctgttactgtgagaagtaatctagtctcacaggggcaagaactcattcatcacctcgagaatggaacaaagccaatcctgagggatctacccccatgactcaaacatctcccactaggcccacaccccagtacctccatgttggggaccaaatttcaacatgagttttggtggggacaaatgatatccaaaccatgacaatgattaatctcattgggtgtatacattatacatatatattgtatatatctatatataatatagatattatatatatacacagttgacccttgaacagcatgggtttgaacattgtgagtctagttgtatttggaatgtcttccacctctaccaacccctaagacagcaagaccaacccctcctcttcttcctctgcctcagcctgctcagaatgaagtcaatgaggatgagaacctttatgttggcacactttgacttaatgaatggtaaatgtattttctcttccttatgattttttaatagcatttctttcctttagcctattttattgcaagaatatagaatgaaatacgtatacaaaatatgtattaatcaactttttatgttattggtaaggcttctggtcaatagcaggctattagtagttaagttttgggggaatcaaaagttatatgtggatttttgactgcatgggggcttgccattcctaacatctgtgttgttcaagagtcagctgttgtataggcaataccttgtaagaaatatctttctagaaaaaaaatttattataagatgttggctcacatgattatggaggctaagtcccacggtctgctgtctgtgacctgtagaaccagaagagttggtggtgtagtttgtaggtctgggagccagagacgtgatggtattaaggccagtccgagtctgaagactttagaaccaggagcatcacaggcaggagaatatagatgtcccggctcaagcactaaggcagagggagtgggaatccaaccttcctctgcatttttcttgcttttaggccctcaacagattacgtgaggcctgactacattgaggagggtcatctactttactcagtccacaattcaaatgataatgtcttccagaaataacttcacacacatccccagaaacaaacgtttgatcaggtatttggtcagcctgctgcttagtcaacttgacacataaaattaaccatcatatcctgcttcttccaagttagtgtaaggccattgattttttgtgtatatgctgtgcctttgacaccttgccttgttcccaagtagcctgtaaaggtattatgctaaaccaaaggagaaattatatcattcccttaagaggcaagagtgtcttccattactgatggctttaaataaagaacagatgacatgaggtaaagcatttgaattattttcacccactgactactattttaaggaaataacttttaagacatttaaactcttcaggcattgtccattgttactggagaaatgaagggtatggtagaaagtacacagacttcgatggggatcttggccttgatatgtacaaagtatataattttagacaaattaattgatttatttagtttcctgattgtaaaacagaaaagaatacagggtattaataaatgagataatacatgtgaaagtggtttgttctagactgctgcatgcaaataataccactattgtgtgagcacacatttttacagtagtttcatttctttagaaagtgactgcatgagttcctcaagctccctggccaatggcattctttagtagctgaaaccctgaaaatgatattctctctggagtgcaaaaggcagttcaggtacagacaacaaattatgtgtaataacttagaaggcaatttgaggaatagcctgccccagttggaatttttttgagcaggtacatttcaaacaattggctaaagacctgagttcagactcttactcttgagagatcgatttcttttcgtagttatactggtcaagatcttagttttttgttttgttttgttttgttttttttctcttgttcaaaaagacagcacttcattggcaaagatcctgcccttttaggcaggattgatatattttgctctctgaatgtattttacttaaagtcctttcatgtttagtactttcccccaagaacaatacatcagcattatttgagtagccagcaagcatgtctgtggcttttgactcttttctcatttgtgtgggatggatagcattttatctcccctattcatcattccctttgctcttacaaaactttgttgtgaagcatctcaagacacgggatcagcaggactgtctttttccttcatagaagaaagattaggatgtagcgctattaaatgactcacgtgtagtctcagagctggttagtggcagagccaggatgttttctttcctcataatactaagggcattgtcttggtattattctgtcatataggcacgtgaatagcagaaatgaagaatcctttgccaaccctagagaagaggagagtaatatacttatgcttctctaaaataaccttgcttagtagcaccaatcctgagtgtgggaacatttccaaataagctaccactttccatttcctgtcattattctgtgtctacatttggaggataaaaagagatggatggtttggatgtataatagaatgaaagcagaaaaataatgaacaaatcactttctttgtgatgcattcattcatttatcgatttactcctcaagtatttattgagtacttactatgtgctaggttctgttttagtcaccaaagatataggagtaaagaaaatcctaagtatcccagcctcatgaaccttccaatctattgagagagacagaaaggcaatgcatcataaatcacccagttactgtgattgcaatgaggataaatgattgaaagaaaaggacagggtaccatgagctcctacagtaggacatttcagctgagtgcagaagtctagggaagtctcctgaaaaaggactccttagctaagactaaaaacatgggtaggagtgtggcagatggtggaagcttggggacatgacaagcaggaagggtctaggtaaagagaagagtttgagcaaaaatcttgaggcagcaaggatcttgtcatgtttgagaaacagagatttgaagtgagagagcaagtggaagggcataaaggggataggaagaggagttgttggtgatctttggtcttggtcttagaagagctttggaaatcacacagactattttgacctctttcacacagcaatggaaaattattagaattatctttctaagcagacaggagcattatcggcctggctacagagaaaggaaggatggagaagggcaggactgtatgagagacccagtaggagatttttgcaataatccaggcaagcaataatgttgtctttgtctgggaaggtggctggtaggggatacaagcatggtacatcttatccagattgtgaaggtagatttgattagaggtaagactggagggagaggaagattttgatgataactccccagactggggcatgggagactggtggtatggcatgattccatactgatgatgagatcattagaacacatttttgtttgtttctttgttttgttgtttggagggttgtggtacaagagttatattttgggcatactaaccttggtatgtgagtcatcaaaatagagatgttgatcttggctgtattgatccggagctcagaatagagaactggactgaaatgatatgtatctgagctattcacatataaataacatataaaagcttgtgggaggacgaggtcaacagagaaaggacacatgagaagcgaagaggtcccaggagcagccccaaggaacagttgtttggcttcttaagatgtgcattacaggaggtcatcactgacaaagtttagggtggggacagcaaagttgaaggcagtgtttagagatatggaggagaaccttgcagaggaaactgaaaaaaagcaactggggtggaaggtgaaaagccagaagagtgtgatgttgtggaaggcaactgtattagtctgttctcatacaactaataaagacatacccaagactgggtaatttataaaggaaagaggtttaactgactcacagttctgcatggttggggaggcctcacagtcatggcagaagatgaaggaaaatctaaggcacttcttacatggcagtgggcaggagcgagcttgtgcagaggaactcccatttataaaaccatcagatctcatgagacttattcactaccatgagaacagcacgggaaagacccacccccatgattcagttacctcctgctgggtccctaccatgacacatgggaattatgggagctacaattccagatgagatttgggtggggacacagccaaaccatatcagcaacacaagatatgtgtggatgctgccgagtgcgtgggcaggatgaagtgccatgaggatcatgggtaacccaacctcaagctggatgaaacactaaagcataaagactcagcatccgattttgtcctaataactaaatggctcattactaagctttgtagaatttcttcttctgaatatttattaatttatttattttgagacagagtctcgctctgtcacccaggctggagtgcagtggtgcaatctcggctcactgcaagctccacctcccaggttcacgccattctcctgcctcagcctccagagtagctgggactacaggcacccaccaccatgcccagctaattttttttttgtatttttagtagagacggggttttaccgtgttagccaggatggtcgtctccatctcctgaactcgtgatctgcccacttcggcctcccaaagtgctgggatcttctgaatatttttaatgattaaaatgatttttaaaaatatttcacctggaagctagttgaaaatagaatgaaacccatgaagcaattaaaaaatgaactccactgactcacctctggattttggggcagtagaaaaccaatgtagtaacttgaagtcaatactgtttctgtattgccaagttcaaggccttaacaaattaaaatattgaaagtagcttttccagtctgagtagacaatgtggggcacacctggtgtgtcagtattgtaaattgatattcatgcagtttcctgattgacttttttgagtcttcaatatgaatggagtggagtctaaaaaatgagacttaggtgaaagattttagaaacacaggttaggaaataatactacttgagggattcaaaccatgtgtttcctctacttaaattctgctttaaaatgtgtagtttacagtaaatttttatggttagtgctatagaaccttcttcttcttcttttgtttttcttcattttttctttttcctttatttctttttctcttctcttctttttttttttttttctccagagtagctgggactataggtgcatgccaccatgtctgactaatttctaattttttgtagtgacagggtctggctgtgttgcccaggctggtctcaaactcttggctcaagcaatcctcctgccatggcctcccaaagtgttgggattacaagtctgagccacagtgcctggcccagagccttctttaattattatttaggtgttacacacctcaatgaggagtgtacctaaccttaaccctaaccctgaccctcagtgaggagtgtagctgcttgttttggttgattggttgagcttgtcacataaaagagcaaggtaagataggaaattgaattctacattggatatgaatttcaggtattctattattcttgcaaaaaattaagatgttatagactctgactttttcattgttcagtaataacatgtgaaaaacgatctggagaaaaacaacaaaattttataattcaagtgaaattaggtctatcattgactaagagtcaggatagttggcttttatagatccaataaaagtgtatggaaaatccattgtgcaaatttctagagcttcataagacacaggtctttgtttcagggagctcatagttgagtggaagaagacaagtgtatataaataattataaaacaaggaggtgttgatttttattacaaagatgtgttttagaaactcaagaggagggtagaatgttgtgggagaggatgcacagaggatataataaagtgaactgagtcacagtcaatgcgaatagtgaaggcttgtaggaggagggaagggtcatttggcatgcttagcatgaagttgcatctagtggaatagagggagatgaatttgtcaaggtagagagtaccccaattgtgaaggacctgcctgccaagctagggggctgttgagcaatttcaaatgattgacaggtacttcttgtattacagggcataatctctggcaaggtttaggatggggagtagggttagaggcaggggactggttaagataccattacagtggtccaggtgaagcacaggagaaaattaccagtaaaaagacagctgcacttcttaaatagaacagaagtatccctgaaaaaaatatagatctggattccaatttcaattttgtaactatattagagttcttcaaagaaacagaaccgactggatgtatgcatgtgttgtgttgtgtgtgtgtgtgtgtgtgtgtgtgtttgtgtggagagagagagagagaaagagagagagagagaaagagagagagagagagagagaaagagagagagatgctggcaagtccaaaatttacaaggtaggccagcaggctggagacccagggaagaggtaatgttgacgcattacttcttcttccagggacgtcagcctttttctattaaggccttcagctgcctgggtgagactgactcccattatggaaggtcatctgctttactgtaaatctactcatttaagtagaaatttcgctcatttagcatctgaaaaataccttcacagaaacatctagaataaagttggaccaactaactctctgggtatggtggcttggccaggttggcacataaaactaaccatcaccttccgtgttcttgttcagctgattgaggttctctgaggctaagaaccagaatttaaacatgggagccagaggacctgggtttgaatctcagcccattattaccctcaggttattgcatcaattagttagcctcactgtgcctcagtcttcccatctgtaaatatgtatacacacacacacacacacacacacacatatatgcatacacacatacacacatacacaaacaactaggccttaagtgacactgatggttatgtatttatatatatatatatatatgtatacacacacacatacatgtatatatatatacacacatatctatgtgtgtgtgtgtttgtgtgtgtatatatatgtatgtgtgtgtatatatatataaatatatatatataaatatatataaaaaatagtaggggctccagacattaaaagtaatttgcctaaggtcacctaggccttaagttactgtgatggttacatacaagttaaggagtattacttaatttattttaagattctaaaattttagatctacaaggtgcccttgacatctactccaacaaattcatatagtggatgaggagttcgcggtaacttgctccattcatacaaataggtaactatgctgttctctttcaggatgccatgctgtgcagtagatattttccccaaagtgcactaaatcaaatttccatagcttcaatcttgtttgaaacattctaggagacgttcctactttactctcacatagagtctgctgggaatttagatattagcatacgttactgaatttctgtgagatagatagagatagggccttggtatgagactcgcctatacagagagaagcttccaagccacaggcaaaatgaaaacattgttcatgactgttttctgagcagcactagcatctgtgagctgattttagggttttgtcattccccatcaggtgtagggttttcagagaaagacagtgactcatttttcttaaaaaaagttgtagaggccaggcatggtgtctcacacctgtaatcccagcactttaggaggccaaggcaggcggattgcctgagctcaggagtttgcgaccagcctgggaaacatggtgaaaccccgtgtctactaaaataaaaaaattagccaggcctggtggcaggcacctgtagtctcagctactcgggaggctgaggcaggagaatggcatgaacccgggaggcagaacttgcagtgagctgagattgcgccactgcactccagcctgggcgacagagcaagactctgtctcaaaaaataaataaataaataaataatattttagaaacacattaccccttctgtttaggaggtgcatttctagatgtgatgttcactaatacagctgagtacattgctaaggagcgtttaacgtttcagtggtgaactccaatgatggtgtaagttacttggcaaaacaatcatcaatggcattttcttcttagtagagaaactagaaaaaatagccaatagaatcaaaacttaaaaataattcttcctctctagaatgtggttttgtttagttttgttttgcatataaggaaataataataataatacaaagtttatgtggatcagtgtgaactgaaaactttgcatgattgaaatcgttttaacatcgaaataatggataaaaagttcttaacaaggccagtggacattcttgaattagccatcacatgctatccaataattggagcgatgtgctaatttactgtcgtgcagctctgaagattttatgacattcagacacttatcttttccctcaatcacagcaattcagacaggatattcatctttgaagctttagccagcctttctcttttcgtgctaaaccctctagaatgttatctctggcattttgagataatttttgaaaggttattttcaaattgccttcattcctattttgatgtcatttaacttatcacatgatgagaacattaggctcactgctgccttggaaagattgttttaaatccactttacttcgctatcagtatattctttattaaaaggcttaaaagtatttaaaataagtccattaccatttttagggtctcattttggaattgtttttattgtttcaggggcactgaatattcaatttgtatagaaaaaaagacaagtaaaagtattcattttctattacttaagttgggataaagggagtcaaaagtgatcctgtttgaattccttggccttaatcccatatctttcccccatcactttgtgttttctagaaggcagatttcaaataaatataaaatatcttaattgtagatttttgcgtcagaacaatattactatatgtttctatgacttaattcttgagacagtgaaaactccagtctaatcgatgtaatagttataatgtagatgtacaggacattcctcagtacttttatttggaacttctttcctgcctcactcctacctgggtcaatatccagacaggatgcctctgcccctgcctgtggcatcgctgctcctttgccatccctccatgccttgggctctgtattagtccattctcactgctaataaagacatactcgagactgggtaatttataaagaaaaagaggtttaatggactcacagttccatgtggctggggaggcctcataatcatggtggaaggcaaaaggcaagtcttccatggcagcagataagggagagaatgagaatcaagtgaaaggggaaaccccttataaaagcatcagatctcatgagacttattcactaccatgggaacagtatggggaaaccgtccccatgattcaattatctcccatcaggtctctcccacaacacatgggaattatgggagctacaatccaagatgagattcgagtggggacatagccaaaccatatgagcctccctcctatctgccctacgtgagtgagcagggaggagagcacaggacgtgcagaagaggaagatgtgtcatggcactgactatgcatccttcctgtcctatgggtaccaccaacatcccagccaaggactggacaataactgcattgtgacaggctagagataacattctagatattatcatatatagcatataataattactatattatctaaccattttcatcaagatttttagagttcctctttcacccatacagttaatgattccctgttgccatctctgatatcaaactaaggtttggcagcactttgatgaccgatgttacagcattttcagcatgcaatctcggcccccataagaatgtcctccctggtgctatattctgtgaactgccccttggctgtacctcccattcctagagaacctcttctcctcttccctcacctgatcttgcctcccctcagatacagacacttcctgttaattaggactcttgtcttggaactactgcttaggtaggatgactcttgtcctcatctatcccattttggggtcctcttagcttgtcttcccagtggtggtgggctttcatcacttccacagctaactctgagtcctgattcaccccacagccaggaaggcgcttggacatccatggcacatatcataggaaaaggaacaaggaacaaggattaaatcacgtaaaacctagaggtcttgttaacacgcttgtcaggctttcacatcagcataagagtactactaggttacagcgtctttaggtctgaagttgtcttgtagggtgggagtccaggcatctgcccagcagaggaggcagcagtcttaaagctcctttcagcagacagaaacaggtagagtgactcctccaattactgagtaactaattggagtcctctttaatatgttctgcatgataaggtggaatatcttaaaaacagctttggtatttaaagggaaaaaactgtggtttgttatatgggatagctgcagtgattgaatctgctcttcactgatgctctgcagccctggctacacaatatatgcagctgctatttattctccagacatggatctgttgggttcatacattttttcatacattccaggtgttacatcgatttcttttggatgcatgcattctaattaaaaacataaaatatgattatgtcaaataattgtaacaaaagtagacaatatctcagtttcctgtttatgagcattgctctactggccctcccttagtagcagtggtgattttgggggttatattgacagaggtcttaagtcatccatctcctctggcctgatgccttctgtgatggggagcatgcatttgcaaaacagtgggtgggaggtaatcatgcagtttgtacctgtggactggcccatgtgggattccgcaccacagccaacaatgaattaacatgccgactagcgtgtgactgacatacacaggtttttctgctcccctaattgcctagaacatttcatgctttttttttgactccttgccatgaacacagaaatacactatattagaactcgggggtttctgcagcccgaagagcttgaaatcacccgtaacccaaaaggctcttaatattctatattgaagaagattcaaagaatctccccaaataggtgattcggctaccaaattaccaaggtgatcttcatgagggtttttcagcagaaaatgtctttaaggatttaatctactctgtgcatttttagctatgtaatcacctaaaagtctcgatattagtgagcttcctctcgtatttcatttctagagctttgattgcactgaattaaccatgtgatatgacccaaatatctcctctgatctgtaccttgtcatcataaaatctaattcatagaatgcattttgccttttagaagtatcccaatttttgctgatatcatacagagagtactcaggtactcacagcctcattactctattattgagcctggcttatgagagacttcagagaatttaggcacttttttttattcttctcagcagcagtagcagaagatgagctgcccatcactcagacgactgtgtccaggctccttagacaacagggatctccccataggctggcctctccctgcttccttgccatccctctctgactcctacttcatattccgtagttgctagagtcccagattctttcacacctctgtgcctttacttgtgttgttccttctgcctagactgtctttttctaccttctttgaaacattcctataatgcattctttatgactttgcatagacaccatatccttcaggaattgctctctgatcctcccaggtagggctggcagactctatgtaatcccagggacaccctgtagaatatctcttgcctccccttgctgagataagccatgtccctctctcctctgctttgtgcagtgctgggtcactgtttgctcccccatgcattggtgtcatctgtcactcagtgctctatgctcaaagtagtagttacagggtgcgtagtgatcactagctgagctctactggaaacactggactctcctaataaactaataaactgagttaaaaaatacattaaagccacagctgaaaaagataatttttaaaaaggattgcttctgatctcttggatttctgggactaactcttacataggagtctaacccagttagcaaatagtgtattcaataaatggagtgaaacacataaatgttctttttaatttttttctttcttttcttttcttgttttaaatttcaagaccatgtacagtttttgtcaaggtcaagagagctgagaaggctaaataatttgatgtcggtgtgtatgtgtgttgcacggatttctggtcattcttgttttaagatggcaaaattccacagcctttgaaacagttgtctcgtaaatgctttagatgagagcttctcaagctttaatgtgccacccaaatacctgggactcttgtcaaaatgcagattctggatctgtagctctggcaagggccctgcattttctaacaagcttccaggggatgccaatgctgccgttccatagaacacatttagagtagagacgcgtttgtatgctgagggtgtctcactattttcagtgggtaagactttaaagccaaattattttctcctgtttcaaaatgctcaaatataaaagcaccgtcgacaacttgattataagaaacccaagtaaaactcatattgttgtctgtctaggcttttgaaggacctttttgtagtctaggcaagtttatgtgacataaacaagacgtgctgcatcctgatgaatttcagcttttttctttttttttttttttttggtgatatatttagagtgaaaggagacacatctcactgttctctttaagaaaattctactgagaggagctggcaattttgtggcgtttcccaaaccatttcattgtctcctattcccattgagtgaagagtagaatatccttgtacctggagattaagaagtctttcccactggttccccaaaacccctgtgcattagtttcttagggctactgcagcaaagtagcacagacttggtggcttaaaacaacaggaacttattctctccattctggaagccagatgctgaaatcaaggtgacagcagggtcacgtggccattttccccaagaaggctctatgggggacctcttctttgcctcttccagcttctggtggcttctggcatttcttgggtcatggaagtatgactctaatctctacctccatccccataggtccttcctctccatgtgtttgtgtgtctcaaatctctctctcctgtctcttataaggaaacagtcactggacttagaagccaccctaaatccaggatgaccttatctgtagatccttaactcagttacatctgcaaagaccctgtttccaaataaaatcatgtttgcaggtactgggggatagcaattagacatatctttttggtggacatcatgcaatccactgcatcctagttccttgaatccataatggatccagaatatcaagactggtgtctgagtctgtttgagctcctataacaaaatacaatgattgggtagcttgtaaacaacagaaatgcatttcttatggaaatttatttctagactgggaagtctaagattaaggtaccagcagatttaatgtctgataaaggattgctgtctgcttcatagatggcgccttctatgtgtcctcacatggtggagggggtgagcaagttccctcaagcttcttttgtgagggcactaatcccatttataagggtcccactctcatgacctaattgtctcctaaagaccctatctatcaatactattcattggggattagatttcaacctatgaatttgggagagataaaaacattcagaccacaattgctgcaaaagaataattcatgcaaataccctgttctttgcagagcacagtaagagatgctttgtccctgagtttcaagggagggattaggaaggtgtctatgccatagtctctgctctcaaagtggtaatcatgataactagagaagaaataatgaatagttactggatttttatgagtgatagtctgtaaaagggctttcttgaaagtttttgtttaatctttccaaatatgagataacctgttattgaatgatattacagacttattccttcatttataatatattttctttagataattggcctctgtttatttctttctttcttcttcttttcccttttttttttttgacggaatctcgctctgttgcccaggcttggaatgcagtggcgcaatctcagctcactgcaagctccacctcccgggttcactctattctcctgcctcagcctcccaagtagctgggactacaggcacgcgccaccacatctggctaattttttgtatttttagtagagatggggtttcaccgtgttagccaggatggtctcgatctcctgacctcatgatgtgcctgcctcagcctcccaaagtgctgggattacaggcgtgagccactgtgcccagccatgttcttggaagtaatattgattggggcaaatgccaattccagctgtttactggacttccctgggtctcagtttcctcatctgtaactgggatagtagtctttcatgaggactgatatgaaatgatgcacatagagcccttagctcagggtctgacctttctctcaagcattctgctaggtactgtacacatgagagttcagggcgacttgggaactgacagtactcagcaggtgaagccactggtggcacttgaacaattgtaagggctgtcaagttcacactccttgcccctagccccacccatttacaaagaactttaaaaaattgcatatctcagatcccaggatcaaattcattttcaaatggactgtttccttctctcttgaggggagagattgggtttagccttgctgaattggttattcagcttttagctgcctgcagcagaaggaaactcactgtcggtgattgaatctcccctggggaggatgggccgcttcctttccacatggcgctggtctgagtgaagtgggaccagatcagattagagaccaggataaaggaagtgcccccaatctccctggctcatggaaattccttcctattattctgaaatggagataaattatgtgataacatgttacaacgtggtgatccctcttgcgtaaggatgtttcaaaagtctattggccaataataatgataaaaaatctttgtttcacagaatgcacttgctacataaacattcagcaggttaactgacgcaccacaaattctgtttgctgcttgggaattttgtcagagcagtgcgtttgtctctgggaacatttgtgtctgtgtctgtctgtatttttctaggtgaagaaattcaggcctataaagagttgggaacttgcctaaaacctatgttgtttatagctagcaatgtggcttgcctccttatgtgccaggtgggatgtgaaatgcttcacatgggttatttcttttcattccatccttataagtcaggcactaatattgcacctatttcataggtaagaaagtcagcccagagaggcagaagttcagaagcgatagagtcacttctcccaggttccatgtctgggaatccatacagataatgtaagaaactgagagtctcagcagggcatttctgaatgagcactgcctaagttgggattatgtaagttggaagcttattgtggtaattaacaagttactatgggttaaggcaacagaagagacggcaaaagataatgtatgattaattcctaatgagtgaaacagccaatactcactatatgtgctcaaactaataggagtacacatttgtatttttaaaaattagataaaacatatagttggttattcaaaatcagcttaacatccctctataattttctaccacaaagtcaattcttaatctgttttcaattgcattgttcaatatgctgttcatagtaaacatttcctgaaaacattgacatttacagtgtggctttgtcaggctaattcatacttaccccacaaagacatgtgctgtggtggttcaagggcaatttaggtgaaaggttgtctgtagcacaggctgaaccagataagccaatgacatggcaggccatgtgaatttccttgcttcgcttgttataaaccgagaccgacttgagaaattagatagctgcctctagaaactcaggctcttgtaaaaaaataaacaaataagtaaaccagctaaggtagaattacttgtacactgagatcaaaagcctaaaagcctaataagaaacatcaacctatggtcctaaaagcctaataagaagcatcttgttttctttgatgatccaaacatgggcagtggagagacggctggcagaatcaccaatcttggagaattcctgggtttgtgaaatccagcataggctgggtgtggtggctcacgactgtaatcccaacactttgggaggccaaggtgggtggatcacgaggtcaggagttcaagaccagcctggccaagatggtgaaagccagtctctactaaaaatacaaaacaattagccgggcatggtggcgggcacctgtaatcccagctattcgggaggctgaggcagagaattgctggaacctgggaggtggaggttgcagtgagccaagatcacaccgctgcactccagcctgggtgacagagcgagactctgtctcaaaaaaaaaaaaaaaaaaaaaaaattccagcatataagtctaggcagtctaggctaatttccataaccagtgaccttgaaacttccatggcttaacacagttgagtctttatttcttgcacacagtgaagtccagtagggctgtcagtgagagggctctttgctagggttcagggtttcagctcttgccatctggtcacttcatccaacatgccttggggcttgtcttcctcccctggatcctcagcatctggtagacaaaggaagagagtatggaccatgtgtctgtgcgaaatgtgactcacatcagcccttcccttgtcccattgacaagtgccagtcacatgaccctaccttgctgcaggtactggggactgtcatctagcaggctgtccaggcctaagtgggggactctgatgttggtgggcacccgaagtttctcccacacctaaagactttttaaaaaatagaaatatggccatcttatgattatcatccctgattcaaaaagaggaacctttgcccggaagaggttaagctctgttaatatttgatatctgatgagcaagccttattctccctgcctgtaagatctgaaatttgaatcccagggtaacctcctcttcgtcaacttccttggtcctgagagattgaataaagttgctgctaagattgggagggactttgaggctttagtacctgaaagacagcatcttctccaaaccctcatggaggctgtcctgggtgatgagccgcatggcaggtggaaatcagctttgctgggcttggatccttccagggcactctgtgactggctctgcccactctgggcatcagttttgactcactctaattgtcaggtagaggcccctcaggacagttgccatctataacaggacctagagggttctattaagatgacagagggatttgatgagaatgagccctcactctgtgataagaacaacaaacatctccctgccaagttataggcagcaccagaaacgatgcagaccagcttctggtgtcagtcttccatttctcttccctaaggaaaagctgcaagctctgagctagtttggagaggaaccgtctctgcttaagtctcgctttcctccttttacctgtgggcccacatggttcttcctcttgatcagcttctctcttcagaattctaactagtgagtcttctattaacaatagcttcttcttgctgctgtaataaatgaccacaaacataatggcttagaacagtgcaaatttgtttactttttttttttatttgtgatgagtctttaaatgtattttttttaacttgttatagaacagttctatatagtgttctacatagtgttatggaaaacacaagcttgttctcacacatttatgcaggtgagaagtttaggatgggtctctgtgaactgaagtccaggtgttagcttagcgatcttcctttctggaggacgtaggggagaatctgtgtccttgccttgcctggccccctgcttcccttggtgtgtggcccattctccatcttcaaagccagcagtggccaaatgtttctcatgctgcaacactctgacactgactattctcccttcctctctacatttaagggccttgatgattacattagacccacctagacaatccaggctaatcttattttaaggtcagatgattagcaattttaattctatctcctatgttaacttccctgtaacatgtaatataacattagtaggttgtgaagaataggatatggacatcttttggaggctcttaatctgcccaccataggctctgcaaatgcccgagtttgagactaagggaaggcaattgaagctggtgatctgaaggtcaaggtctttggtatcagattgcctgagattttttgctttaatagtttctcatctttgtgaccttgggcaaactctttagcttctctgcacttccatttcttgccttgtaaaatgggtgtgataataggactggcctcctaaagtctttgcaaatttaaatgaggtaatacacgcaaacattttgcatagcatttggcccatagttagagtgaatatactggctgttagtaattagcaagttcctgttgttgatcactcaaggcatggcagtgtgctgtgcagctcagtttctgcacatgcctacactggcttttgcattctctggatgaggcagagtggtttttcaaggttgcttacaagaaagtataaaaacccaagagctaatgcatgctgggattaatacctaggtgatgggttgataagtgcagcaaaccaccatggcacacgtttacctatgtaacaaacctgcacatcctacacatgtaccctggtacttaaaaagattaaaaaaaaaatccatttggaaatgaaaattctctctaattgcatttgccactctgtcctgacactggatattgatgctttctcccctcatgggaatcttgtgttcacaccgtggtgagatcctttctccatcctccccaagtttccattgtagggaggagggccctagttagtcaatttcaccaactgcctggatggtgcaaaacacacactgtctcttgggtaacagactacttgaagatgtattcagtaggaacacagtagttttatttgctgagaagtgtggatagttcagtgggttttttaagagacaaagggctgactagtcgccagaccttatgctgtgatgtcagatttccctgagcatctggcttgtccaggtgtaggtaagagcaggaaagggttttctacttggaaccttctgtttctgatcattgtttgcagaggggccctgactttgtttcaacttgatacatctccatcaccaaagcaggcctgggatggattttatctgagcacaagggattttagtgaaccaaaccatctggggagtcaagggaccttggatctgcatccttatgggtgggcatagagggtgaattatctatattctattgaagtagttgacagaagaccagggaatctggtctacatgtattaaatttttgcctgtgcaacggaagcaagaaggcaatgatgctttgcatatatatattttttaatgtaagtttcaccattgttctaggtaagaagcccagtttttatcttctgggagaaaatgaactagatcattagggagtcataatttcctttgtagtttttctaatagtttcattgaaatgttgtttgatgtgataaaaagaacctatttttaattttaaattagcatagggaattaaaatgttaatgtatataatcttactataaattattacaatcctattactaaataaaactgagtttggagtatgaaataaatataaaggtgtcttagtcactttggactgctatgacaaattccatagatggagcggcttaaacaatagaaatttgtgtctcacagttctgaaagctggaagtccaagatcaaggtgctggcaggtccagtgtctggtaaggggcctctttttagttggtagatggctagcttcttgtatcctcatgttggaggtcagagaaggaggaggcaagctctctggtgtgtcttcttataagggcacttgtcccccatcatgagggttccaccttcataacctaattccctccccttgaccccatctcctaacagtgtcatattggagattaggctttgacgtatgaattttggagggacacaaacattcagtgtgtagcaaaaggtatgatgttccaattatacaatgtaaaaataaaaacttctataaaggggaaaggggatgattatattctttcaaaagtgagtgaaatcaatgaggttttcctccaatcactttctacttctttccagttgattcttttaggcagtgaaatcatttcttgaccaagagataggtcttctagggagaaaatcctaattttcaagcactggtcacatggtgtacctcttagtgccacttcctcttgggctgaatttcaattcactgttggagcatcacattcagaatgccattctaacatgggacttacatgtgacatgaatgtgtttaccccaagttctaatcaaataaactctcccgcttctctcaatgttttatgcatctttatgcatgttcaattagaaattcatggaaacctgtgcagtaagctaagctgttggtgccctgccttctggtactgagtttcctgcctcaaaatggtctgtgtcaaagccagggggtgcaaatttgcctatgtaaagtggttgatgaaaattacatctgctgcctaatatgtgggaaagtagagcataaaatcagagtgtgttgtattatttttactttcctcaatcccttacttgcctttcaattaaaattaaatttttctactgtttgaaacacgtatttttaaaaagttcttaccttgtttctaactccctgattgtacagcacaagatttggggttcaggggcatgttggtctttgaaaaatcctgtcagtggttgaaagacacaaaaattgttgggaaagagttctggttcttgtaagttcccaggcctaaaccaacttccccagtgcagcctcagtgcacttggccaggcgtgatcctctgactgtttgctctggcaaaaggaagagaaaatcttcaccgtctctttagtattagagaagcgtggtagagaagaaagccaaaaaatgatgatggagattcagtaggggaaaaggaataaagacaactggaaaaaaagcacgaacgtggcgagagcagattgctctgagctgccaaagcaaataatccattaactcctcacttgctctgaacatgaaatctgtggtgcaaatagctagcgggagagttgctgtctcagaaagaatggaggagcagagctttggaaagcctgcttgaacctggtctcagaaagaagaataatcatgcaatcgaggagtagacaatgggttgagaaaggaacagcactctcacatattaaatatttcttgggatgaaatgttatcctaatttcttcccccccagccccaggaaagagcagctactattttttaaacataaagactatgtttcttctgagagatatagaaaattacgggcacacgatgggcactttacaagtggaaactacttaagaatatttaatgtgctttagatatgtgtcaattggacaaagcagcttcatttcaaggctctgagaagtcctgtcataaagaaactgtttcccattagaacatttgctaaattcctgacaccataatattcctttcccctccttttatcttttgctttgtacatcgtgctgatgggtgaaacaaacttaaaaggaatgcttgtctatctccctcattttacaaataaggacatgagccaaaagaaaagataattgtccaagcttcttttctctggaaggactgaactgaaattggaacgtcagtgttttgcacagagcgcacctgttagctgttgtcctctaagactgataaaagtcctactgcagcaggagcactctttgaatgctctatggcataggctcatgattcaatgggcctctgaatgttggttttgcactgaacaaaacttttgttggacctaaagctcatgcctgtgttaagagacctaagaaattctagaagtgtaacaagagtttgacctcccagaattcctagctctggtttcagaacaattcagataaaccttatgctctatcgaactggcagtgagtttgcttattgaaagaaaatcttctgagaatttctccttgcttgtcttctctgtagaatcagagtattgtggcttcagtgcaagtcctattcattatcattttgggaaaaataggaggaaaactttcagctttttcggttagaaaagaaagagggatttataagtgtcacttacaagagaaatagtgattaaaaggtgtttctacagaatctcccaaagaacatataaaccatcagttgggaactattcctaattatgcttcagtctttaatatactgttttatttttcagtattgacatttgtatttgacattgtcaactgaatgaatttatacaagcagaaaagctatagggcttatataatatctgattcttatgctttcagtggaggtaacagaaacagaaggaaacttaacaacatctaatcaaaggaatatagtttccctccttactgcaaatacaatccgattcagctatattagcaatgatatcccaagttgttgtgcttaggtttttagtcaaaatattctggaccctgatttatatctagtctgattttctttaatgcattcaaagctcagcattctctatatgcgacaaagaacatagcacatatgtaagacggggcgagggggttgttacttttacgatgctctcccaacaagtgtgacttcttcaatttgaagtttacagtaagacacttgtataccagcttaaagtgatttcacacatgaggtcagtagaacttcattttcataatcatgtcatgtatttctgtcctgaaaattccttgaaggctttattttatcttgtagcagtggtggacttcaaacatcgctgtttttgtagaaatgtcttattctttaatcaaactcagggtgacattaacaagctattttcacagctgacttcccagtgctggagctttctagtgtgttttgtatgttcccgctttgctcttcactttcgatttgtttatttttcatgacacatctgaatgccttcttgtaagcagagcccttgtcttgagatccaactgtggggttattattacaagggcacattgcagggatccttagtgaggggttaagagacatggttcagaaattattttcttttctgaccaaacatatgcatgatgtttttcctcccaaggagatagaagccagtcttgaatttctgaaagctctgagtatgtaggaccctggtgcttttgatgttatctgtctgatcctctttagagagatttatattattatcatctagctcaaccactagaagggaaagaccaataattcaaaagcttaagccaagacctataatgtgtccatgagtcagagctttaatcctaaagctgtcttctttatgtcacatggtcaagcttagtgacatggacctcaggtgtatgaaacggagacatctttactaatatgttacaagaaaattgctgagctctttcttttgagtgaagactacaaattatcttcactctatttagcagggatattgcctccaaaacaaattacttagactaatgctggcactgtccaaaaagtggcatacatctacttagtaaaatgagaatataaaggcataaattagcaaatggtagcattgtgattcccttctctatttcagattaatcacatttttttccaaagtgaaagagataagtacatgatatttacttagatccaacctccaaatgaatgtccattttaatttgtaagtgtaattctaataggaatatagctactttgcttataggcaattagagaattttgcttgtagacaaaattacagactttgcctgtggacatttctctatctgttacttatatgactattctccaacatcatttgacatgcttatatattttcccacagattaaaagtcatgcacaagatgaaactcatcatttattttctcctgcattggtgcaaagatatctgattcttctcattctcgaaacttgaaaatcaaattgagtagaaccaaatccagtaattatcagaaaatctactaattatcacacatttaagagtggacactaactttgtagctgtaagtcaaagacttttttttatgactgctcatatccagaagaaacatttttcagtctgtacccttcagtgaatgactgatcggtctaatttgaaattggacaaatgttgggtacagcatgatcatgttatgctgtgtgcaatatgctgacagattccagtgtctataatgagtatctttgtatgaatggtttctgatatgaaaagaaatttgcttatcaatgcaaggagaaccattggtatgttaattttatgcaagtatctcttcactttctaattcactcctcccaataatggaatggtaattggatttctgaaggaatatgcatagaaagcaatttaaaagtaatttgttaatcagaaattactccaaatttgtgcaataaaaatgaggccctgtagcctttgtccgaaaatgcaaaatgggcaattttccctaaatattataatttgagagaggtttacctaccacaacctataaacctcagtggtcatttaatttctaccattagagaattgaaagtctcattttatttgtgttaagcatttttccctcattttggccttgaaatgcaaaaacctaaattagaggtgttatatcaaacctttattaccttaatctttctaaatgttttccagttgtgtgtttctaagaggagaaaccggggtctctctgtgtttgtgtggtttaggttagggaagggtatgggaagtgtagttttgctatccttagaagtgggactgtgactcaggagctacgtgtctttggcatgttagttaattactcaaatcattattgtcttcgtatgtagaatggggctcacgctatctgttattagagtgtggtggggataatacatgtaacgtatcgtgtgtagcatggcacttggcccatactaaattgtgtcctcactaaaatctttaagatagtacttgtttttttcttttgtttgtttttttttcttgctgatttgtttgagtttcttatagatcttgtagatattaggcctttgtcagacatatagtttgtacatattttaggaatttttgtatatggtgagagatagggatctagtgtcattcatctacaagtggtattcagtttttccatcaccatttattgaatagggtgttctttccccagtttgtgtttttgtatgctttgtcaaagatcaattggttgtatctgtctttatttctgagttctctattgtcttccacttgtttgtgtgtcacttttatacctgtactgtgctgttttggttactatatccttttagtataattcgaagtcaggcaatgtgatgcccctagatttgttctttttgcttatgattgctttggctatttgggcttttctttggttccatatgaattttaggatttttttcctaattctgttaaaaatgacattattttgataggaattgcattgaatatgtagattgccttggatattatagtcattttcatgatattgattcttctaatccatggccatgggatggatggctttctatttgtttgtgtcacctctgatttctttcaatagtgttttgtaattctcttagagatctcttatctctttggttaagtgtattcctaggtattttatttttttgcgtcctattttaaagcggattgagttcttgatttgatttccagcttggttgttgttggtttgtagcagtgctactgatttgtgtgcagtgattttgtaacctgagactttactgaatgtattaaatctaggaatcttttggagaggagtcattagggctttctagatatgagattatatcattggcaagcagagatagttttccagttttgatgccttttatttctttctctggcctgatagctctggctaggacttccagtactatgttgaacagaagtcatgaaagtgggcatctttgtgttgtttcagttcttaggaggaatgcttcaactttttcctattcaatgtgatgctggctgtgggtttgtcatatatgacatttattatttcgaggtatgctctttctatgcctagattgttgaggggttcttttttttatcataaagccatgctagattttattcaatgccttttatgcatctattgagatgatggtatgatttttttcttttaaagttctgtttatgtggtgaatcacatttatcgacttgtatatgttgaatcatctttgaatccatgggatgaaacccagagccctcagccgatgcacacatacatggataagctcaaccaagatctgcagactcccagctgaactctgtagatgtgtaatgagtaaatgttattgcagaccactggtgcttcagacatttttgttacacagcaaaagtcagctgatacaaggaggattggagaggaaagaccagaaaagggggcgaggcttgatggctcgctcctgtaatcccagcacttggggaggccgaggtaggtggatcacttgaggccaggaattctagaccagcctggacaacgtggtgaaaccccatctctactaaaaatacaaaaattagctgggcatggtggcatgcacctgtggtctcagctacacaggaggctgaggcacaagaaccacttgaacccggaggtggagtggctgagatcgtgccactgctttccagcttgggtgacagagcgagactccatctcaaaaaaaaaaaagaaaaagaaaaagaaagaaagaccagaccagaaaaggggagggagaaacaggatttagaaaggaaaacagtgggagaccgaacatcacaaactgtgaaggagactgacagtgagaagaggaccacagtctgacttgggcattgttcttaaccttgatagagaatggcattcagtggagtcaattgctgggattggagcatgaatcaggttataagagagtgaacaaaagatgaagaactttaaacatgatttgtagacttctcttacccagaatttggcaagaaacaaaaggattgagagaggtatacggacaaagatctgttataaaaatgaaatggtgtcatgggcagtgtattaagtttttatttttcgagaggatgcatttaagcatgagtctaagttctttggttttctgggacctccaagagcacttttgggaccagctcagatatgtgagccaaaggtgcctgtgacttcaaaagctctcggtcagcacttggaaaaaggaaaggtgaaactgttagttaattgacagagctgttgggtcttagtcatcatgcacagtccctagtagtttagttgagtgagaaactggacatactgcctttcagcttggactatcatgatggtgccactagagagattcctcaaggaaggccagctgcaccatagcggctctcttttctctttggctagtttctccatcactgttttcctttttgcagtatgaaaacacaaggattgggtagttagttgagttgcctatgcccctctcatctttgcttttcacttgtttcagataagtgctctctatgctcaagtgattcccagaatagactgtctacttcttacagtcatgctgcgatgtctttccacctttgtaccaccaccgtacagtggagacccttggatgaccaggcactaaagaaatgcttaaagattgaactgagctaaaatatgagtttgagggttataagcccatacccaagacaagtaggaaacaccttgctagtaaacttgttggttctgtgtgtaaatgcagtaggcattcatatcaacaagaaatcagtgcaagccaggacgattggcattaacttcaagaagaggttgaacgtgcactgtactttcaaggttagacatcatttagctgaatgtgtgatggcacattatgcatcccaagtatttgtaccaggagtagcttgtttatgaaggacagagcaagtctgcaggataaggataaggcctggcagcagacacttgttactcacagatggcagtgaaaaatccaaagatattctggccaaagggttaccattgccattgactgtgactatcagggctgatgctgaaattgtctagttaatgtgactgataaatttttgtgagtgcctcagttcattcaggttactattacaaaataccttagcctgggtagcttatgaacaacagaaatgtatttctcacctttctggaggctgggaagtccaacatcaaggtgctggtgagagcctgcttcctggattgttgtctttttgcggtgacagaaggagtgggggatctctttagggcctcttttagaagggcactaattctgttcctcagagttccactcccatgacctaaccattttccaagaggccccacatcttcataccgtcacttcgggggttaggatttcaatatatgaattttgcagggacacattcaggttatagcaaggagtttgatgatgtttcctggaaatgtaattgcatatcagcttttttttttttctttaccagagggagtttttgtgaatctcttacttatttgaatagactctcttacttatttgtgtctgtctaaacccattgctttgaaagggaattgcatgcccattttgctagtaatcatttatatgaattttaatatacatttttagaaaataatttaattcttattttctacagtaacagaatatattctaaccctatttgcataatagtattatgcaaattttatatagatggaagtatgtttatttttattttgtaggatgcatatcataagtaattacttatagataaagtttaaaagggaaatatctcttcaaacttaatgtcacacaggagaaacagagagaatgggcaaaagatacagagatgaaggcccttcaggcagttatcagagatttcaaacgtggtaaacaatagaggaacctcagccagagggattagcattagtgaatgttcccggttctctgttttactcccatcactaccctggtttcataaaaggttagagctttttggcagtaacacagtgcctggcacatagtacatgttcaataaataattatatgtgtgaatcatgtaatgaatgcatgcgtgaatgaatgaatgatgatgactcatccatgtatttttctctcatttcttgcctggcttccattgcatccctagtttgctgaaatagagcattcatgaatcaactaggatttgttacagaaaacaaaaactatgggatataagacagggaattgggtacttaaaaattactcagagagctggaggagtaggactaaggcctgcttgtactattaagttcaagaaaactctgatctgggcatcgggaagttggaagctacaagccacaacactggacactgcagttgccctttgacaaccacctgactctcatgaccttccagggaggcacagccaaagcagcaggaagtgagctcacctcccttccccctgccatgactttcatcagtgcctgactcaatgccttgtgtgtattcaggttttcaataaaagacagttatttaatcaaatggcattaattaaattagtctgttattctgtagattcctgctttgctttacttgaactgttttttccagattacgttctttaatttctatgttgattagcttatttgatgagacataaaataacaaaaaagaataccttaggaataggcaggtgttctgattggtgggtggatgagcaaattgtttgggatcattgtctttattttagggagatatgaatgaaggatctagattgagtttgagctttgcacggtaattacagttgagatcagatgaccaggaaataacagcaggaactgttcacgtatgtttcttatttggggtacgtaacttgttctaaccaaatgggttttttacttacttagaaaaccacaggccacaatcattctcaaatttcagttcttctgtctctcatttatttctcttctttctactctctggcctcatttatctactatggagtacttaactgccatccatatagaaatacaccttttagttgctgataactgacattttccagctggtgaaacagaaatcaacaccacagtctgaagtctatgttgtctttcttgagaaacaaagactccctttctagacaaatttctgagagctggctctttagtattccagtattaagtgtatcatgtggtaattaattatgtattccatatatgtttagcatctctgcagttaattaatacgcctcctagcattttacagatttcataaaatgaaatctgcgaggaaagatctcttgtgaaaagcattgggaaagcctttatgtctttacttaattagtgtgacaataagaatcactcacttgagggaaatggcggcgtctagggatcaaggttattccaatgacttgattatttcttttccttttaaaggagtctagtctattcaaggttgatacaactaaaatctcagtagagattaaactcatagggcttaagcgtttgaggggtaaatgcagctctgaggaacagaatataccaaagtccattttaactactgcctttcaaagtttataaataagccagtgttttcagacacctttaaatatagagaactttaccaatatcagacaagtaatagctgcaggcaagcagcaagtgcgagttattgatgaccagctgcttttgcttctgctagtgtgttaaaaaagaatgaacaactatgacgtttctccactctctctctctccttcactcctttgttttacttctgaatgtctcagagtataaaagtaaggctctgtttcctatcttctggttgccaatgtgaagttagaattaaaatattaaacaggctttcagtaggagagatttaagaatttcctgagaaaattatggaaatcactgtcaccagcaatactttgcaagcacaaaaataatttattccagtgactctaacagtataagctactgtgtagcttttaaatataaacagaggagaacctggacaaagatgaatccctacaaatctcaggcagtattcatggaaagtagtgaaccggcttttgataattactcagcagagcagaagcaggcttccagtgtatttttgcctctgattttttttttcttttgtagtttatgacaatgagacacaactggaagtaagtgcgtggtgtgaatgtggaaactatgatcaaattgctgtgtatcttgccactgacaccatctgtatttagtctctatttcaggtccatagtaccagattttttctctaatgactgaaggttgagaacaaaagagtatttcttattgtgaagaggtctggtttctgttaggaagatgtattctgtccactccttcatttcatcatgaatactccattgcctgttcactttctttcttttcctcgcttcctttccttttttcctccttccttcttttcttccttttttaagccacatttttgaggtatgaaaacgctgtcctcatcttactgggagggatttcttatctaaggcatttgccttctttatcatcatagccttagggcctggcttacagtagttgctcggtaaatgttttaaaaatgaagacacatgtaagggcaaaaccgaaacccaaaaaattgttgcctaccttcctcaggtgcctgtccgttcataaggactcacctatttcatcaagaatctttatactcttcagaatacaccatgtttagaaactctcaaacctatttgtgaggagctgttagtgaaaggagctcagttctgtctcttgggagttagttcctgctcctggcagctcttagagaccacatggaacaagaagtcctctcagaagcttctattctgggatttctgcagagtgcaggtgtttgtgtgtggggggtgcatgtgtgattagtatgacttggtataatgcagatcaactgaaattgagttgaattttgtggtctgatgaaccatatacgtaattgactaattgaaggacaaagggcatacttgattggtggaattgacttttctatttatgtaacaggttacttgtgttgtcaggtatcacaagtatatatcatatatatttaagcaatgctacttcatgggtattttctaactactattttgactgatgtttctacagtagtcatcaaatgatcttaaagcttgtgtgtgttgtatcatgtgtgtgtttaaggagaaagggagaaaagcaggaaggttgtagacttcgttactcaatggcaactgtcttcgaggaacatttattgatgtctaatgtgcacactgacatgcatggaaattgtaaatgtacataaaggctgctgagttttcatgaacacacccatgcagcctgtactgggatcaggaaacaaccttaaacctttgcaggagacatttgatcccctcttatgcggctgccagtcactatctcccaagggtaggcactgtcctggtttctaacagcatagattggtgttgcctgtttttgaactacatgtcactggaatcccacaagtactctttgttgtctggtttgttttattgaacatcatgtccttagcagtgactcttaaaaatatgctgagttccacagcacctgatttgaaaaatgtatgcgtgctctagaccacaatagatctttttttaatagtcagtatctgctgtgataaccattattatgatttttaactcttcccacagggtaaaaaaaaattaatgtaatttgataagcagttacccagtgaatttgatcaacattgagcacaatgtgtatgcctcagactttgaatccttgaatgcagcagctgtcttctttacttaatctgatgttatttccagttatttgaaaagctaaaacgtagtattcattctgacagcagtttgtggttggaaaatggaaggtagtcactgactgccttctcagtgtgtgtgtgtgtgtgtgtgtgtgtgtacacacgtgtgcaagcatacttaactgtgttgtgatggtgagaatattatgtgcatgcggatgctctgcaaatatgaagcatgctatactgaaagacggcattgctgctcacagttgtaagctttacaaaaattatgtataaatcgctgtctctgtcttaccactcatgccaggagactttaattgacatatttagcttatgtgatctttttctagttgttactccaccctctgtctcactgccatcaagccttcagttaagtttttcacgtaagtaaaatgaaagagccgcctaatgtttggatgcatcagcaattatatgatttaagtttactctctccttcttttacttttataaaacctttagaaatgcagaaggtcctgacttaagatggtttgacttatgattttttgactttatggtgatgcaaaagcaatatggcttcagtagaaactgtcccttgggtacccatacaagcattttgtttttcactttctgtatagtattcaataaattacatgagatatgcagcagtttattataaagcaggccttgtgtcaaatgattttgctcaattgtaggctaatgtaagtgttctgagcgtgtttacattagactaggctaagttacgctgtccagtaggttagatgtatttaatacatttttgatgtaatgatattttcacctttcaatgggtttattggaatgtaaccgcatcataagttgaggagcttctgtaatagaaatttaagctaatggaaaatgcaaataagaaatcacccaaaactaattatattttaaaaataaagatatattgctctttccatgttcattacaagtttggaataggtcctgaatttaaatataattaggcagcgcaaaatagggtatgtattacagggtcaataaaatattgacttttaaggaaatccagtcgccttattttaaatgttgttaatctgaatataatcttaattttttataataatagacagatttcccctcaactgatttttcagaagctttaatcagctgtctcttgaatgcttcctcatgctcccagcagtttcaagtttgtctcatttatagtatcatgtggattaatattatttggtatgatgcagatcagctgaaattgagttgaattttgtggtctgatgaaccatatacttaattgactagttgaaggacaaagggcatacttgattgatggaatctacttttctatttatgtaacaggttacttgtgttgtcaggtatcacaagtatatgtcatatatatttaagcaatgtttcttcatgggtatcttctaactaccattttgactgatgtttctacaatagtcatcaaatgatcctaaagcttctaaaatgattcagaacctgaatttcacaattaattagccagccagctctctcaaaattcaattcaatccaacacagctttattgaacaccttttgaatacaaggcatgggattgatggtaaaatgcaaaggtaaatgaaatgactttcctgacttgaaagagtcatgttcttacggaggtcagaagactctagaatcaattgatgagatctttcatggacttcttgaaagaccaagggagtcacatcaaattgtgtgattaagtttccctcatttgcatgaagacaatacctgtacttgctctttttttttttttttttacaagtatatgtagtatgaggatgagagagatgtgtatgcaatgggtttatcattgttaagctatctctataattaaaataattgtaataaaatagttgcaattgtcatagtttatttaaagaaaaaatatggtgcattatcttgtatcattttcctagttagaaagccttgtcttcagctctttaaagagggaggtgttcagaatccagaaacgataaggagaaaggaaggaagaagaaaacatagttttaaaaagaggtgactcgattttctactgaaatgaactatctcctttgaactactaaggaaaataaagcagtatttttcttaggccgtatcctaactgcttgctcgctgtgaattatgaagctttaaagcagtaaagagaaatgtgtgcttttctcaagtgactagagagtgaatgctgtgcattgtttctcacatgtgatgttaagttagagcttgcttcacagactccactcgccctttgttcttgaaaagtcttgccatcttggctgtgagtctggtgaacccttttttaatggtcatacaacaaatactgtagtggttgaaagttggctgctttcgcattgcttcagagtctgtgtcatcacatttgttattaatcaggaacataattatatttgaagcatagaaaagaaaccatttatcttggcaggatgggatgagacagtcgcaattcatatgcctgtaaacccaccagctaagtcaaatcactattgccagctcaatcgttttaggttaacctggaggcgaaacagagctgtcaacaccattaccagttagaaagaaaagacttttcctgccacttattggcataaggaacaattaaagtatccccatgcatatgccaagagaaaatttccactttgtatgaagtggtggccatgtaggcaatgaataaaaataatgataataaataatacaggaggtggccaatagcaagaagacttgtatcctttggctttgtgtctgaccttgtcacctctctatccctgaaatagccagtggcatgaccaggaaagccagagtacctcctcgtgtatagttctagtttagagcttgcttgaagcaaccacagtaataaacactgtgtcagccagcagaatgtaactatttaaagggtccgattggcagtgagctgtctcaagtgtcttctgtttataatcattcactgaagtaaatgtttcctattatatagacagcatgtggtaggttactgaacttcactgcctggttaaagtaacgcaaagaatgtaaaaatctgggagccattgaactccttagctacctcttcaatatttcagtcaacctttacatctttctgtcatgaggttgcccctgtggcagctctcttgtggcgttggctgttttgagctattgcacgtgaccaagggtgttataatctgaattgcctttgacagcttgccaaggttgtacttggaataaacatgttagctctgaacaggtaacccttgagtcccaagagcttccctgggtcaatttcactctcatcaaaccaagagatcttttcataatggaattatttctgacactcactacagaatgagaatacacccatatattttcactgcttaactgaagaggtggttctgaatcaagtgtttgtttgctggtgtcatccttttcagttatttctcaaataacagatgtttttctcttgcctcaagttctttagtgtcatactagtgtttatggctaatattgattcaaaatttgggcagaggctccttttccctgtctaatttagcatcctatttgctagtaacattagatcttaaaaaaaattcttttaatgttttgcctgacatgggcagtgatgaattgtagcacggccaagtagttttttatgcccttgcactcttggcctaggtgtgctgggcagtccattacttggtatacattagccactccagcacatactggattgaatgaatgaatgatcaactgaatagatggagttataatatttatgttactggaaaataaggtgttcagttgggccatggaaagaaatgggttctctgaacagcagggaaaagattgttcctacaatctcttgggtgcctttcgcaaattcatcattcttcaatgtgctttttttttctttatagttttccttaatgtacaattcccctgctttatgaaatcacattaggatggaagcatttatttagttttgagacctttatgtccgtcaatttatgggcatcaatttaataagtttttggaggtgcatccctttcctattgccactataacaaattaatgcaaactttttcagcttaaaatgacactcattggttatctcacagtcctataggtcagaagttctggtgggctttactgggtcttctgcttagggccttaaaaatctgaaatctagatgttggctgagctgtattctcttatggaagatgtgaagaagaatgtacttcaaaatcattcagatctttggcagagttgtttcttgtggttgtaggactgagatccttgtttcatcactggctgttagccaggagccactctctgctctaaaggccagctgcatcccttttcacatgactccatccatcctcaaaccagcaatagtgttggagtccttttcacacttccagtctctctggcttccccctttgttacagcaagagaaaattttcggtttttaaaaacaaaattcatatgattaaacccacttgcgtcatctccttttcttaaggtcaactgattagtaaccttaatgacactggcaactctctttcactgtgtgatataacataatcactggagtaacaccatggggtaaaggtcagtgagtccaccttagaattagaattctgcctatcacagaaggtgggagagaagaaataccaaattatggtacagccatgtttgtttgtttttaactgactggtggtggtgtgcatttctccatgcaacattataccttctttttggcatcatagtccatgttggagcctcgtcctcttccagagtctgaaggaggctctgaatcattgataaacttgagcagttactctgagtatcatggtgacatctcaagaacacctgatcttgactctgtggcagctctgggcttgaaaatacaattttgagacatattaaagaatactgaggttttatgcacattttctgttaggttaaggttataatttgtgtttcactctcttgacttaagtgttgctgagactaaacagtttctctgaaaagccagctggaagtactagactgagaattcttcatgatgcagtttgctcttcttgaactcccctgactttgagaattctgtggtactttcctgagctatttggcaaattcttctgcttttagctgcacttcccagtaaatgccaacatgcatcatattctgcaaacactattaacttttgtttgtccagcatttaactctttgtggcatgcactccttggcttcccttgatgatatagtcacctttaatggaaggaactaaagcagctttataaagcaggaagtcatgttttgtaactcagaacaaggaagcttagagcgtctcatattgcaccttctctttgctccagtggtttcatcatgctgctgccaaatggttcttctaaaatgccatctgcatcagcatgccattcctctcccaagcccttcagtggctctctgctggctgctaaatcagcttgaagcatcctggccaaatttatttctcctttcattaaagtttctgctatagacaggttacatctcaatatttttctcttgagtcacatttttgaacctactatatacctaagcactgtacattttatgttgcattatcattatgtctttagatatttggtcttccctgcaagagtccaagcttcttaagcatagtaatcatgttttaactaccttggtagcttcaggatcctgtagaggtctgctgagtggtaagttttcagaaaacaatggttaaatgtatttgaatgtatgtatcaacaatgtaaacctaaataataaacagggagaggctctctaaaagaaaatgatatttattcaggagtaggcattgcaatgggaatatgtgtaacatagtaagctatgtatgtattcggggaggtgaaggaaagcagaggtttttagagaaaaaatgaggaagattacattattgtttgagataattatcctttgccactagcatccagcaataacaagggtggttccagtttgaggctggacaggaaggtactgggaagatgtcctcactgaagtattttgtttaaggttgagatggcttttatgtgaggttgtgttttctacagtcttttatgatagttcttgttatcaggcattcgtgcatgagaaccttctcatggccttccctagctctatttgttagaggttttcttgtttgttttaaacatatgtgactgcattttgatttgggcaacattcacaacagtttatttaataaatatttattgagtcactactgcatcctgcaccgtgctaatggctgaaagatgcaagatgaataggatgtgacttctgcccttgagaacatcctaggttcctagagaaagacatgcattaaattgttctgtgatctgaactctaattggtgcatatatgagggttgaacacagaatttagagcacctaatttcacctggagggttaggaaaaggctaggaggtgaggaggtgacttgtggtctgtgtcttagtgtgaggggtcattcacaaagtaagtcaggaagctaggatgggtgttggagagccatgcccgggagagaatgcaggatgtgcacaaccacagaggtatgtaaggatgtgttgactcagggaaaggtacctgatttgttagggcctcagtattggggtgaaaatgaggctacaaaggtaggtagaagccagattacagaaagcctcaagtgccttgaactttgtccagaagacagtgagcagccatgagttttaaggaaggaacctgatgagatttgtattttatttttgtttgttgattctttcacatgaaccatggaagacaagttttacccatgtctcctcctggccaggcagccgctgaggtgctcacaggtcatgccttgggagggtggactggagaacagggaggcaggagaggccccgcctcacctgtcccctcccctgttgctggactgcagctgccttgctgcctctgaccggcagagtcccaggcaagctccctcctggacccacttcacagcttccatgccagtgctccatgcccatctccttcctcccctgccatggcttcaacctcactgccctcctccagaatacctgagagtgtttctgcttaaacatcttctttttcccatagtataatgggggcacaataattactggatagattcagccccttggtcccaggctctgctcttttaactttggatttaactgatgcttgacagaatacagagaaagattggtctcatcttacatctttccatgccactatttatctcctcaaatggaacaactggagatgctaaaaacccacttcttgaaattacaggacagaaaagaacttgtagtacttcacttccctggcacgtcttgagtgccatagacacttaatagtggctcatgcctcagtggagaactggggaaacaaattgtagaaaccaaaatggaactagagaggatagaaagacagatagtatagcagcttaaggaaagagactcaaatctttctagaggtttcccatctttgattcctcagagcatatattcttgacaaactgcaaaatgattcaatagatatgttatttttaaattaaaaaataaaagtgtcttcaaatctttgaagtcctgttgaattaggataagtagacacaatgaataaatattttgaataaaacaaaccatatagcagtcatggcaaataaaggaggtcccaaagaggcttttttagagttaaaatacaatttcctggccagtcttctcagccccgacttagaccgatactcatcctggtctttgatgagtaaatttgctttggtttctgatttataataacttgacaaaaagaaaagtatatcttttaaataatctactttttgcttttttcaatttatttcctccctttttgttttaaattgtttccacaggcacttgatattacatacagttctactttggaaacatagcatcacttgttttgcctaagcaatgttataaaacatttttatctaacctacacttacttcagcattcttttccattttcctcactctctgaaaagtatttttttttccattgcaaagcagctgaggaacaagagtaaaaatttattataacctggaagaaaaagcaggattcagccacagagaacactcacagtgggaagacaagtaggaaatatggcggagcaggagaggatgttctgagaggtgggaagtaagatgaagatgatgtcatctgtgaaacaaaaacaagaaagcaaatcaataaacataatccatcacataaacagaaccaatgacaaaaaccacatgattatctcaatagatacagacaggccttcgataaaattcaaccccacttcatgctaaaaacactcaataaagtaggtattgatggaacatatctcaaaataataagaactgtttatgacaaacccacagctaatatcatactgaaggggcaaagctggaagcattccctttaaaaacccgcacaaggtgaggatgctctgtctcactactcctatgcaacatagtgctggaagttctgaccagggcaatcaggtaagagaaagacacaagggtattcaaataggaagagaagaagtcacattatctctgtttgcagatgacatgattgtatatttagaaaaccctattgtgtcagccaaaaagccccttaagctgttaggcaatttcagcaaagcctcagtataccacatcaatgtgcaaaaatcacaaacattcctatacaccaataaaagacagagagccaaatcatgagcaaactcccattcagaattgctacaaagataacaaaatacgtaggaatacaacttacaagggatgtgaaggtccccttcaaggagaactacaaaccactgctcaaggacataagagaggacacaaacaaatggaataacattccatgcacatgctccttcatgcttgtggataggaagaatcaatatcgtggaaattgtcatactgcccaaagtaatttatagattcaatgctattcccatcaagctaccattgactttcttcacggaattagaaaaaactattttaaatttcacatggaaccaaaaaagagcctttatagccaagacaatcctaagcaaaaagaacaaagctggaggcatcatgctacctgacttcaaactatactacaaggctgcagtaaccaaaatggcatggtactggtaccaaaacgggtatatagaccaatggaacagaacagaggtctcagaaataacaccgcacatccacaaccatctgatctttgacaaaccttacagaaacaagcaattgggagaggattacctatttaatacatggtgttggggaaactggctagccatatgcaaaaaactgaaactggaccccttccttacaccttatacaaaaattagctcaagatggattaaagatttaaatgtaagacctaaaaccataaaaacccttgaagaaaacctaggcagtactatttaggacataggcctgggcaaagacttcatgactaaaacatcaaaagcaattgcaacagaagccaaaattgactaatgggatctaattaaactaaagagcttctgtgcagcaaaagaaactatcatcagagtgaacaggcagcctacagagttggagaaaatttttgcaatctatccatctgacaaagggctaatatctagaacctacaaggaacttaaatttacatgaaaaaaacaaacaaccccatcaaaaagttggcgaaggatatgaacagacacttttcaaaagaagacatgcagccaacaaacatgaaaaagaactcatcatcactggtcattagagacatgcacatcaaaaccacaatgagataccatctcatgccagttagaatagcggtcattaaagtcaggaaacagcagatgctggagaggatgtggagaaatagcaatgcttttacactgttggtgagagtgtgaatgagttcaaccattgtggaagacagtgtggtgattcctcaagaatctagaactagaaataccatttgacccagcaatcccattactgggtatatacccaaaggtttataaatcattcttttataaagacacatgcacacgtatgtttattgcagtactattcacaataacaaagacttggaaccaacccaaatgcccatcaatgttaggctggataaagaaaatgtggcacatatataccatggaatatactatgcagccataaaagagagtgagttcatgtcctttgcagggacatggatgaagctggaaaccattattctcagcaaactaacgtaggaacaggaaaccaaacactgtatgttctcactcataagtgggagttgaccaatgagaacatatgggcacagggagggaaatatcacacactggggcctgttggggggtgggaggcaatgggagggataacattaggagaaatacctaatgtagatgacgagttgatgggtgcagcaaaccaccatggcacatgtatacctgtgtaacaaaactgctcgttctgcacagttatcccagaacttaaagtataatcataaaaaaagtaaaaaaaaaacaaaaacccaagaaagagtttcacaaagggcagcaggatggtccataaatgcaaaattgtcttgggatttgacagtggggaagtgattgaggattggggagaagattcagaggattctggaatagacagcacagctgtaagattaggaagagattgggtgttgaggaaagagatcagtggttctcaaaatttacttaagaatcatcttgaaaacttgttaaaaatatagattactgggccctacgcaaggaaacttcaatccagaaggtctggtatggactaatgaattaacgcttttaactaagtattccttctgattctgaatattaggtagtctatggaacaccttttgatcaatggtatggcatagacaaccaatgtatcctgctgcttctggaagtgaatcagggaaaggaaagtaagagacaaagtggtgagtagaagcagtagtaaggtgatgtgaaggtccagccaccaccctgaagaagagattctgatttaaaaacaaagaggaaagtaccagtggtattggaacacagcaagataccagggagggcagggacaagtgtgagaccagtattcttacagtacttctcaggaaaaaaggaagagcatagcagttaaattaatctttagtgagagttggggacccagcttaattgacaacgaatggaggaaaacatcagagaaagtgtggcaaatggtgaccgacttccctgtgattgttgtgtttgtgaccttgctctgtgtagagcagcatttagtccccctcatttgtacatttgcatagtcatgtggccatcttgattgcaaacatgattcaagtcgctttttagactttcactggatttatggagtttactttaaaatccaaacatataaagttgtggaggttttgttgtgtttgtcttgtttttttctataaaagtagtcagtgttcactgatatgtggtgggcatgacagatgggccaggcttttgtgaaaaatatgaaagtgactgcaaattatgtataccagtatattttattagaatactaatgtagataaaatctctcaatgcatatacagatggtcctcaacttacaatggtttgacttacgattttttacttcaccatggtgcaagaatgataagcattcagtagaaatgcatactttgaattttgaattttgaccttttcctggggtagcattatgcgttacgttcctcgtacatgaaatattcaatactttatttttaaaataggctttgtgttagattcttttgcccaactgtaaactaatgcaagtgttctgagcacatttatggtaggctaggtgatgatgtttggtaggttaagtgtattaaatgcatttttgatttaacaatatttttcaccatatggtgggttgatagaaatgcaaccccattgtaagtcagggagccctgtatattacataactacaaattctacacttttagctacctggagagaaaaaatatgtaatattggtcgaactagttttgtccccgcatttttaaaactttctcaacagcaagctcaaatcaccttgaaatctgaaatatattttgccatcaatttataggccgttgatcatttaaaggaaataaggtatctgtcataatttatttatgtagtttatgatcaaaattatatttctgaaatctatttgatatttgagacatattttagaccaggctaattaactcatttctacctaaactatttaaatatagataagtgtcttttaacacttaggatttatttaggcacacctgactgaagaattatgaagaatcatgagatagtatttaatcaataaaagtattaccatctcctaaagtcattatttccttgcacaattgtgtattagttttactaattaagaatactacatttaaaagcattactaaaatcccctatgtattttgatgttgctttagttgacttgttctcccttcttccctctcttcttcccttttcctcatttctgtttgtctccattttaaatctatcttattgttgcggctgcatccttcttttattattatctttttttttaagtaatgttaatttcttgaagtatattttgctctggatttttggggacaggtctctttcccagaaaacctagaggagtgggtatctgttgacagaaatcaaatatcttaaacatcattaacggaacagattgtggcatttgttgaagcttcttgtgctgtcttcataaacaggtttaccatctgacttgccattttacaagtcctgtaaaacctaaatgtaaatctgacagtttgtcagtttgtaagccgtttgacttatgctttaatgatttctattttgagggagttttacaagaatacatttaacttggatgatgcagggaggtaagtatggccccaggatgggaaaacataccatttcttacaactgtgtggcaatgacattgtttatgtgtatttatacatactgatttccctggaccattgtgcggcctctaaaataagaaagtaaagttcattttaatagaaacttattttgtttcaggtttattcccagtagccaaaatctttgagaacctaaatgccccggctttcttcataattgccctaaatgagaaaaatgtattcaccaacttggagcaagttgtattaacttaattttagttaaattcaataaaggtttgtttggatctgtaataatgtttactgatttctttaaaaagtaattatagttctgttgtcctctgtgatgtctgtacttcctactgaatatttacaagttagactaggactcctctagcctaacttgtaaatcccccaaaatacgtgggggatagggttagttctgttgaagacaggagaatattgattgtgtgagaagagatgttttctcccaactcctctagaagcgtagagcgtggcaattcatgcaactacaccataattttcctctcattttttgatgaagcttagttttcacaataaattgcctctcaactctcaagagattacctgttgctagttggtcaaaccctagcttaaaaatggcagcaattggctgggcgcggtggctcacacctgtaatcccagcactttgggaggccgagtcaggcggatcacgaggtcaggagatcgagaccatcctggctaacatggtgaaaccccatctctactaaaaatacaaaaaattagccaggcgtggtggcgggcgccggtagtcccagctactcaggaggctgaggcaggagaatggtgtgaacctgagagacggagcttgcagtgagctgagatcccaccactgcactccagcctgggtgacagagcgagactccgtctcaaaaaaataaataaataaatggcagcaattacccagtttgtgaggataacctcattttaggccctgcagtttgtaatcaccttgctgagtaggtttgttcatcttataacactgggatgatgcaaagattgtttttaagcttggcttccaatttcacaagcactctaacaccttctagaagttcttattttctcagaagatctttttgcaccctgttatgatctttcccactgattaaactcctttctaggtgttcatgggggcacataaagcctacatcaaatttgatgagtaccttggctttgaaaacagcgaagcacaactgccaaatacgtaacaatacatgtttttaatacagcaatttaaaggaaagccacagctaaaaccatcactgaaaatgaaaatctaccactagatttggacaaactatttatcttttttttttttttcttttttgagacggagtctcactctgtcgcccaggctggagcgatgtggtgcgatcttagctcactgcaacctccacttcccgggttcaagtgattctcctgcctcagcctcctgaggagctgggactacaggcatgtgccactatgcccagctaatttttgtatcttttagtagagacagggttttgccgtgttggacaggctggtcttgaacgcctgacctcctgatccacctgtctcagcctcccaaagtgctggaattacagacatgagccaccacgcctggcctatagttttatacaattagcatacctcctgatattaacattatgatagcaaaacttgttagatagtttaaaactcccattgccaactatacattattttcttagttgattattatttattattattttaggagtctagaaaaatgtctggttcatagtgaaactgagttatcttacttggttcagattgatggactaaatcgtattgttcctttgaaaatgcaaattttgctaacaagaggagaatgaattcattgttttacagatttgtatatgatcccatgagtactcaaaactatagaatgacacagggccatttgggaatataaaatgagaaaatttctatattatgtctgttacttaaattacttttataaggatggcatagaaaatgatttccattctatgagaaaatatgtttagaaataaaacaaagatttctatttcaaaagagacaatacagatagaatgagtcattgtttctttttcaccataatatcttttacaccatagatttcagtggtttcaaaaacatggttatgatgataaactaggaaatgctgaagcttatcttttactgtgggctttcctcaatagattcttcccttctaactatattatttcaaaggtagagttaaaattttatcctggggttttaattacaccaaatagaacttagcgtgcatgaatccatgtgtggcagaaagatgataaaacaaagcattgttacttatatatagaagatatcatggactggccagctgggcgccatctgttttgtttcctctatttgtaaattgggataataacagtatctacctcataggattgttatgaaatgacataatgcgtgcagagtccttaacagagtgcttggcgcttagcatgtgctcagagaatattcaacagtgaccacaccaaaggcatcagcaacaaccccaacaacaacacctggacaaagaaaaattctcttgcttgaagcaaatgtggtataattatttaaacgttatgttactttcaggagtatgaggtgataccatggactgtggcaggtgggaattgtaacttctctcagagtcagtgtagtcagaccctctgcaagctcatggatgaaacttttcaactcagcgatgtctctggtctgacttttttctttctaaaaattatagtgaaaatacattggaagaacatcatattctactctttgtcggtatcaagtaacattcatttgcttaaaaagtgaaccaaaaaattaaatattaatatacacatttactttatgggatataatctaaatatagaggtagatttctaaaaattaaaacatgtgaagcatgtactagtgaactgcagttggattgttttaggaggtttgtagataccggtaatgaagaatttgacaccatttcttgatgtttgatcattcataacttttaagtcttctatccacatctgggtaagctgataagaaagccctggtgctttttcccttgtgccagtgaaaagccacacagggaattctcatcctcatcccaccctctaatcagtattttaaaactccagcctaggttccttgtcttgctctcaagccacttctgtagctgcttttgatgcctctcctgctcccccagaaggcctcattatgtgaatcgtaaacattttcatgccctcttggtatgagggtgcagggaggcatcatcattctcaacattggaaccgaattttgggtggacgtccatcttcttccttcggaggggccacaaaattactggatataagtttatgatcagagcttcttagctacatcttgtgtgttgtttgtatgttctaaatattgtcagaagaaaaataataagcaaattcttacttcctctatgaatcatattgagccctttacatgggttatctcatttaatcccctcaagagcctttgatacagagattctcattgtccaattttcgatgataaaactaaggcagagaaagattaagtagcagtcttaatgtcacataactagtaagtggccacttaggatttgagcccaggcagcatggcttcaatgcctcccccttcatataaacctaatatacaatttttacaaactactttatgggaacagtcatctttgcatttcctgttttcagctcttacatatttagaaaagattacagtgcatatccaaagctctgtgtatactgtggtctccagcaaatcctatcaaactgagagcagggctggcttctttggcttgttttcttcaaagcaagcactggtctgactcctagcaggcgaccaataaatgcttctaaaagtaaaatactatgcagatgttcagatataggtgctttctgtcttctgttttgttcccccctcttgacttcttttgtcaaactgttgatttgtgcttgtgtgtgaaatgtgagtcttgaaaagtcagtttgaataatagaggatttttaagaaagtacacatttaaaggaaaatattatttctttgataaagcagtaataatatcttagtgcttagcacttcactggtagcttgtaatacaggcgattggatgacacctgtttgtacatgtgcctacttttcccattcaggtattgacgcccaagaatacaaaaccagcgtcttactgaattctgtatcctctcccccgctgctctaacagaagccttcacacatggggcatttctcaatatatgttggctaagttattcaatattgtccaactaagtctaaaatgtatacattgtgccttggagaaatagccaccaagtactttcttgttgtatttgctttgtgcttatcaactgtggtccttgcagtgtggtaggactgttttctccattgcctaaagtcccatagatggtaagttctggccctgtgactcatctccagccatcaacctcacaccaacagaacaggcataccctccactgtgcctggcgcctctctcccttactgtctaaagttcaaatcttggaacctaaaactcactaacccttgggagtgatattttttaatgtcctcagctgagtttattacaaattgacctgataatccttgtttaaatatgggagaaaatatgtaatttttctacctgaccctacttgctccctcatctcacacacacacacacacacacacacacacacacacaaaaacccttctcgttaaagaaaggaaagaaattttgattgttattattattgaggagagataaaattttaaaaactcttttccaaactggaggtagagatggttaggaaaagaaagatattcttcctcaaagagagaaaggacagaagacactgggctgctgggcagaatttgtaggcactctgagagagagagagggattgggcaaaggactgcctgcaccacatcgtggaaagtgtttacacccagtggtcagtgattggtcctgggttggattgccagtttttactaaaaatagcggaccctctgtgggcaagtgacttaacctctgtgggtgtctttctcttcatctacaaaacagacaccaattcttacatacacagttgtgaggagaaaattggatacccttgcgggcggcttcctgtgtccatggaacataacttctctgatccgctccatgctgacaacatgtggactagcccagccttcagtcccaaactcgcttttcacctcaaggaagtcagaaggctctccaactaagctttccccacaaatggaagggcaacgaatgtactcattgtatccaaatacctgtaactgacaaaatgacgtagtggaaaggaaccttgacaccctaattgaattacttgtcaatttttgtaaagtgtgcttgttttccagaggaaatccttttttttttgttgaagacaaactgcagtattcgttacacccggacagtctacttttgtaagacattttgggttttgccaagtgacaccctgacaaataaaagtgggaggtagagacaaacctcatgagccaagcattaaagacaagcctgaaagccaccaagtttctggcactgtggagactttcccaacacaccaggccaccctgagccacactgagtcctccccagaactcccctcaagcacagctcccttctcaatgccagggcaatgggtagtttggttctacaattgtgcattacatggagctcattgcagtgggcagcttcacagctgaccaaagcccagaccctggtgtccaagttttccagtcaaatgtgagacaaaagcagctagacagagactgtccatagaatgtactgagtgcagacagagggagactgtagccctggaagttacatgagtacagagaatggagacctcttggagacttcaaggaaagctttggaactgacttttgctctaaaggatgaatagagagaccttgccctgcccccattgcacagaatgcaccaggctgctccagtagctggaatagcatgaccagaagccaagatgacaagacagagcaccgtggggcccagcaggtgggagagcaccacagagcttcttgtgtgaggtcacatcttggaggggagatggatgcaggctatggatgggctaaggaaggtcttatttgccatgctggggaatatagacattatcctatcgggggaggcatgttagagctctctcactggcgacttcatggaggattggtaatgggcagggcagaggagtatggatggaggcagggagatcagtgaccagttagaacagcatggccatcctccaggggatgggcattgagggcctttggtggggctatgggagtaaagagaattgtacaagctgcaatggagggaagtcagtggcctcaatttcacaaaagaaggaaaactgagtataaacttcacattccccccatcctctcccttacttgtctgtacctgacacatcatatataatcctttccggcttttcataagcttatcattcttgtaatgattttatgctaagaaattgaattatttaagggtaatatggtttggctctgtgtccccacccaaatctcaccttgagttgtgataacccctacatgtcaagggcaagaccaggtggagataatttaatcatgggggcagttacccccatgctgttctcatgatagtaagtgaggtcttatgagagctaatggttttgtaaggggattttcccctttttgctcggcacttctccttcctgccccaatgtgaagaagaacgtgtttgcttccccttctgccatgattgtaagtttcctgaggcctccctagccctgcagaactgtgaatcaattaaacctcttcctttacaaattacccagtctcgggtgttttttcatagcagtgtgagaacagtctaagatagtaacgatggcatatatttaaaaatttggttataatctgttcctatggagttagaagaaacctgtagagaggattgtgggtgttaatgaacctcgtatgagtggatcggccaaatcacacttggtatgaacacagtgatttacctgctggtttgctgtgatgaaactttagccatttgatttcttaatggagggggattatagcttaatatctagaatggagtcttcagcacgcgtatgctatgtcctcaaaatagaaacttgctcctttcaaatatctgtctctgagggaccagaggatcaggggtggaaaattctgagtattttcaaatccagcccaagtatcatcacactttgtaaaaacgactcagcataatgaaggagtcacggtgcctctgacttcatccaggatatggaagttattgttatattcccagtgtttgagactgtttttgcatatataaaagttagaatggttttcaaaaattggctattttaagttcttggctagctcctgcacatccttcacatttcaacacatgtgttacctcctctgagtggcttccttcaactcctctaatcccactgaaatacctcccctcttgtcacatatttggcaatttgtattgaattgcctgtcatctgtcttcctgactagactgtgaggtctttgaagagagggactgtttagtttttgtgctttcatcacctagaacagtgcctggtgtagattaagcattaggtaaatgaatggatagaatctggattctaccgtatgctggctcctattgtgctcattttgacaatttagttctgtttggttggttggttgtttttttgtttttctttttttcctttttttgtgtgtggcttaaaacatagttttgtattcatgtttcctttcaacagcaattgtgttagaagtagaaaggttgttggtgaatcacctggctttccttggattatataaagaagtataaattatactatttccatgcttatgaaatgttttacttgggggtctatgtttacatcaatagtttaatgtcaagcatacaaattattttcatccactactggcgaatccatttgaccactggagtagaacctttggaaatgtgttgcaatagactatgtggtggtcaagatggtagctgcagttagctgcatttatcatgcaggttcatgccttacataaatctctgaatttcaacctgttttttttttttttttttttgtaaatcacaaaagacccatttgtagctttagtttaaaacaatacaatgaaaaaacttttcttaagaggaaataatgacctcaataaaccttgaacaagctcccttatggttttaattgtttacatttaaaaattgatgtgcatgtgtgtgtctttgtgtgtgtgcatgtgtatttgtactttactttgatgtgagagtgtaaagtgagaagcatttaaaaatttataatagaaatgagattaatattccatatgacagcaaatacttccagcagacaatgaagccaacagtttctacttttcacttaatctttctgcaggatctaattggtcacaacagtgggagaaatagtcactagcattgcttataacgtatgtcatatctactctgctttggagaaggaatttttttcctgccccacctaaaaactagactagaacttaacagtatttctcaaaggaaggcagctatagaatcctggattttggctggcggtcaaaagaagagtttccttcaggtacttaaatgaatagtttaaagtgaaagcaaagtttctgaaagtcctggatacttaccattcagccaaggtctttcttgccgagcaccttgagaatgtgctgttcatctgtgcaagctgttaaagtaagaagcaaagtatcaatatggggccagtgattggcatctggttatcactctcttgagcctgcctcacttaaaaggctactccaggctcattaaatttcacagttttcatagccaccatctgttcgctagaaggaattgccataccattccatgactccagcatattttccattatgctggctttatatagtctacatttatgggctctctttggcatcagcatccgagacaagtaggtttcatttctccttaattatgcttttactccagggttttagcttagaagattccagtatgatcatgttccatgacttcctcagacttcttttcatcaaagggaaaatggctgcagtttaaataattttaagtcattacagtagtgggcagttgcagtgtgactcttcaaaaacacaaacaaatatgctttttcactttcgaatatggcaatttttttatcaaaaattggataatttatgaatttaatgaattcttgggacaattacttatgttttgaggaagtcaaaagaaagttcaatgcttactgttgttcaaaacatttcttgaaaaacaataatgtctatgcagctcagaccatttccctgtgccctaaacttcatggctgataaacaaactcatctcatccaaaacttaattcatcatttttcttcctaaattgttctttcttctgtgagtggcacaaccccccactcagtcaaatccccaccaccatgatcatgcctattctgtcaatcatgaaccagctcaattttacttcccatcactttcttttgttcctggctctctattttgtaccatcatcctctttcactgtaactactgcaatagcctcttaccttgcttcgctgcctccaatctccccaatccattcaccttattgcattcagaaggatcttcctgaaaataaaagatctgtgcatgttatttgccttcttgaaacacttgaatggctgaacaattaggtgacttacacactcatatttcttctccagcctcaacattttctctcacccttttcagttctttagactttagctttgaatattttcccctaggatgattctctggtctcctgagtctgagtctggagctctctgaggccctgggcactcattgcttcccctaacataagacctaacaaaaaaactgtaaaaagagacaaagaaggttattatattatgataaatggatcaattcaccaagaatatataacaattgtaaatatatatgcacctaacatcaaatcatatataagtatataaagttatttttaatagatctaaagggtgctatagaatgcaatacaataatagtaggggacttcagtactctactttcagcaatggatagatcatccagacagaaaatcaacagggaaacagtggattttaataacattatagatcaaatggacctaacagatatatatagaatactccattcaacagcagcagattacactttcttctctagcacacatgaaatagtctccaggatagatcatatgttaggccacaaaacaagtttcaataaatttcagaagattaaaattatatcaggtaactgttctgaccataatggaatgaaactggaaatcaacaacaggaagaattttggagaattcccaaatgcaaataaattaaacaacatgctcctcagtaaccagtgagtcaaataagaagttaaacaagaaattgaaaaaacatcttgagacaaatgaaattggaagcacaacataccaaaacatgtgggaagcaacaaaagagttctgagagggaagttttatagaaataaatgcctacatcaaaaaagaaaaatgatctcaaataaacaatctaacattatacttcagggaactagaaaaagaagaacaaactaagcccaaagtcaatagaaggaaggaaataatgaagataagagcagaaataaatgtaatagatattagacagacaatagaaaaggtcagtgcagctacaagtttggttctttgaaaaggtaaacaaaatcaataaacctttagccagactaagaaaaaagagagaatactcaaataaatgaaatcagaaacaaaagaggagatgttgcaacaaataccactgaaatacaaaggatcataaagtactactatgaacaaattattcgccaacaaattggataacctagaagaaatgaatacattcctagaatctgccaagactgattcaagaagaaaaagaaaatccgaacagacaaataacaggtaaggaaactgaatcagtaataaataaatttcctatcaaaggaaagcccagggccagacgactttgctgctgaattctaccaaacatttaaagaactaataccaatatttttaaacctcctccaaaaagttgaagaaggaatactttcatactcatttaatgaggccaacattaatcatcattctattcttgtaggccttgtgtgattttggtaatcatcatcaccagaatcacacaagacctacaagaatagaaaataatggatcagtatctctaatgaaaacagaggcaaaaatcctcaacaaaatactagcaagtggaattcaccagtgcattaaaaggattgttaaatgtgatcaagcaggatttatcccttgtattcctgggttacaaggatggttcaacatacacaaatcaataaatgttttacaacatattaacaaaatgaaggacaaaagccataagatcatcttcttagatgcagaaaaaccatttgacaaaaaacaacatctttttatgatacaaactcagcaaattagccacagaaggaatgtacctccacataataaagtccgtatacaaaagcccacagttaacatcataccccacagtgaaaagatgaaacctttttctctaaaatcagaaataaaacaatgatggccactcttatcatttttactcagcatagtattgaaagttgtagctagaacaattagataaaaatatattaaaaacattgaaataggaaaggaagaagtgaaattacctctgtttgctgatgacatgatcttacatgtataaaaccctgacaattccaccaaaaaaaactgttacaactgataaattaattcagtaaagtttcaggataaaaaatagcacacaaaaatcaatagtgtttctttaatagtgagctgtctgaaaaagaaattaagaaatcaatcctagtcacaatatgtgtcaagaaaacggaagtaaatttaaccaaggagatgaaagatctgtgtgctgaaaactataaaacactgatgaaagaaattgtggacaacatgaatgcaaagttctcttttgcttatggattggaactattaatattattaaaatctccatactatccaaagtgatctacagggtcaatacaatttctgtcagaattctaatgtcatttttttcaaggaaatagaaaatataatcctaaaattcatatggaaccataaaacaccccaaatagtgaaagcaatcttgagcaaaaagaacaaaactggatgcatcacactatctgacttcaaaatctattacaaagttgtagtaatcaaaacagcatggtaccagcataaaaagagatacattggctaatggaacaaaataaacatcctagaaatttacccaccaatttatagtcaattgttttttttgatgaagatgccaagagcacgcaatggagaaaggcaatcttttcaataaatgctgttgggaaaactggttctccacatgcagaagaatgaaattggacccttatctcacatcatatacaaaaatcaattcaatttggattaaagactaaagagaaaggcctgaaactataaaattactagaagaaaacataaaggcaaagttctacgacatttgtctgggcaaagatttcttggatatgaccctaaaagcacaggtaataaaagcaaaaaataaataagattgcatcaatatggcctctgcacagcaaggtaaacaatcagtagaatgaagtggcaatgcacagactgggagaaaatatttgcaaaccatttgtgggataagaggctataatccaaaatttataaagaattcaaacaacccaataacaagaaaacaaattatctaatcaaaaaatggacaagtgacttaaatagatatttctcaaaagaaaacatacaaatggccaacagatatatgaagaatcgctcatcactaatcatcagggaaatgcaaattaaaaccacaatgaaatataacctggtaaaatggctatttttaaaaaaagacagatggtaagaagtgttggcgagggtatggagaaaagggaaatcttgtgcactgttggtgggaatataagttaatacagctattatggaaaactgtatagaggtgcctccgaaagctaatgttagaatgaccatatgatacagaaatcccacttcttggtatagaaccagaggaattggaatcaaggtgcgaaagagatctgtgatctcatgttcattgcagcattattcgcaatagccaagatatggagccaacctacatgtccatcatcagatgaatggataaagagaatgtggtatatatgcacaatggaatactattcagcctttaagaggaaggcagtcctgtcatttgcagcaacatgggtgaatctgaagaacattatgagaagtgcttattgctaggcccagaaagacaaatactgtatgatgtcatccatatgtagaatctaaaagagttgatctcatggaagtagagtagaatgggagttaccagaggcttgagaagggagatagggaatggggagacattcatcaaagggtaccacattttagttagacaggaagaataagctttagtgatctattgcacagaatggtgactataataaataatacactgtgtatttcaaaatggctaaaaaagtagactttaaatattttcaccaccaaaaatatgtagcctggtgatggttttgtgaataagcttgatttcatcattgcagaatgtaaatatatatcataacatcattgtgcaccccataaatatatgcaattatttgtcaattaaaaataaaatataaatacataaataaaagtcaactggtgggaaaaaataggacctgagaaactgattctaagtgttgtttgtaattctgcatcatcccctccacataagctgtatatgaccaggcactctgttccttgtcatatccctagcacctagcataatgcttggcacatggtctgtgctctgtaaatattgagtgaaagaatgttcacttttgggggatgtcgcaaggtgaggtaaaaatgtcatttaacagattttgcaattggtttatcaaattatatttgctagaattctcatgagaagtaaacacatcgtagcacttacacagtaaacttgctagctgagaccatttgatttaatttagtgtacagttttgaattcctgtatcatagctgggtggaaagcacactaaaattagattcagaaaattttgggttcaagccatggtggcatcccttagactgtggaactggacaagtcagtttgcttttctgatactgagttttttcctctgtttaatggagttgataatgacactgacatatacacatgagattatatgtgaaaacacctaaccttgtgcctagcacataataggtattcagcgatgctttcatgtattgccatgagtgagagctaagatatactgatgtttcatattggtcaagatgctttagtttttcttttttcatgaattcaagtcactgtgtgggacataatttaccaatcctaactttgtgtgctcacttttactttaaaaatgtatagtacaactttaactaactcagccacacacacgcccatttccatcaattctattctgtttctcatccactccctcatgtctcatccatttcgtttttttgtattttgtcctatagaaaacattcaaggatagggataactctgtctctaagttagcttgggtttttcattttgtttgttttattttgtgttcaagaatctcgaaataacttcaaatttatatttacaaaatttatattgacactgaagaaacacattagtgttcttcccctaacaggtaatttcacatttgtctcctttttgaagtattatcacacttttctttgggctgcctcactttccacggacttctgaagctcttttaagatgtggttttggagctttttttctctgtaagcatatttcatggttgacaaatatacctcaaggacatgttacaatcagtggtagggaaaaaatagattctgactttgccctcatggaactcacttttttttttttttttcaaattattaccctcaatttaattaacataatgaatgtgatcaaacgcaaatttattgacttagcattcttatcaagtttctttgaaagtgcaatgacgctgaggttgaataaaaatgagatgctggccaagagctgtagtttcaaaatatatactcaagagaactgctgagagagttacagaatatatgatgcatgccagcaggggcggctgtcatatggacatcttcacggtataaccagttcacacatttgaaccttcatgtagccggaagagaatcctgtgtctccactctaggtgtaaccagcatccatgctgcagagtaccttctctgctggaaaaccaacagctaggacaagacaccaaaacaaacaaacagaggaagaccattggaaagttcctgctgtgaactcatctcttctctccttttcagaatgtggtattttccattaaagaaacagaacatactgaaagctgtcagtaaaactgctggttgtgtttttattgatttttctgagcagacttccagtaatagttcattgcatattcatcctgggatgttgtaatatagagcaggattaagaagtaactctctagtatttgggtgtccacggagaagcagccccttgcaagccatgaaaattatatttattctggcttctcctctacctgggggacacagccattcaccatagcacaattgaccttatgaattgtatcctgccttggaggaagaaaggctttgcatttctaattgctttctaattcctttgtaaacatttaagtcagcacaatatcattgtcccatttctgacatgtatcgaatactgattttacgtatcttctgctcctatccggcttttaaggaatgtggaggtagaatgctgtgtccattatctttgcaatcacagttttcagaagagaattattcataggtatgtaatctcaaatgccttgtcaacatctccctggaaagttgaaacaaaaacccacactgataattcttaaagctaaccagttctaccaactcacacaatctgcaatattattttaattaggctctcctatgttggtgatatttctgatacattatttaggtattttacttgctaaattattattttttcataattttagttatcacagtatcaaaaattttctcactcagttccaattctgtttgcagtgcatatctttattttgataaggcaaaatgcagtagcttctttggagttgcagaaagaaaaattagtaggtttttttttttttttttagacagagtttggccctgtcgctcaggctggagtgcaatggcatgatctctgcccactgcaacctccgcctcctggattcaagcgactctccggcctccaagcaactctcccacctcagcctcctgagtagctgggattacaggcacccacgatcgtgcccagctaatttttgtatttttgtagagatggggtttcaccatgttggccaggctggttttgaactcctgacctcaagtaatctgccctcctcggcctcccaaagtgctgggattacaggcatgagccaccaggcctggctattagtttgtttttaacttttacgttcttctaggttgttgtggatgttttgtttgttgtttcttatgttataatagtgatattcaacacgtcttgaggtcagcaaaaataataaaataaaaatttctttctcttatgataaagtggcttgtattactttctttttggaatttttaaaatcctagaaaaatactatgtcaggtaaagccgacaatcctttgttggaatagatacgttgtctcttctagctacataaggaccaggtgatcctgcctctctcttcttcacctcagggcatgaaaaatcaggaaatatgaatctctactattagagtgtattagaggatgaaccaccagggacacggaggtagaattattttaatcatactggcaatgccctttattaccctggaaattgattttcgcaagaaatgtgtgaacaccttttgattatcagattgcttggtggtgcattgggaagggagggaaaaaaagccaaatcgggtgaaagggctatagtcaaagagaaatatatatatatatattatttttatttatttatattctgggctgtagtcaaagagaaatatgtttttttactttttgaaatagatttatttatactacattatgctgaggccttattgatttgctacatttagcatgttagggtttagtttcctaaagacagatgacttaatcatacaaattactcctccttgcaagagggatacgttcagagatcaaaggcaagtcggtagtgtgcctaacagaagcagagtgtatcagttatctagggccacaatattgctgcataacaagtcaccccaaaactcagtggcttgttatgtggcactctcgtgaccgtaaatggcaagggtttggccgttaattggggcatgagtcattagtcatctagtcttccagaggttggggctttattctgtggattttatactcttgttaatattcttatctcttggctaatctggatccaggagctatgaaaaacattcttgagaccagccactgagacttcatttggaaatggggaacagtacccatgaatagatacactctaccactcaaaataaccagattatgtatagtctgcaaatgacttgccttttctggttaatgaagggttaattgaatgtgaggtttctgtggatttgaattccagctcttaacagtcagccgtgtccacttggacaggcaattcatcctctcagccttaacttgctcctatgtgaaatgggaactttgatttacaagattagaattgagtataatgccctatgtggacgtgctttggaaacttttaaagcactagaaatgagttattttattgaagtcaggctgtatgccgaagaatgttcaaatccagcctttatggccatattctcaggctttatcctgctttacacagcaaaattggtagatatctttgtaagtttgtttgcttaaatatgagtataatgttatcttcaatttaacacatgctgtatttagtgtatcaaaccaaaaacatattatagatacagagaacttaaaagatacaaatgtctggggcttttatgaatgggaaaagtcatagttataatcagaatcaatttccaattatccacatatagattaatcaaatgggcacatacccaaggcaactccactttttatctttttcctgacagtattttttcctctgcttatcttttagttttctcctttaaattgtggcttggtgggacaaaaggaaaagccttttaaacatgctaaattacccttgtttttctcaccctgcctgcctcagggaaggttcaaggagagaagtcacaggtagaaaggctggtgtttgaaataaattgtaggaagtcagctgcccatgaggagaaggaaaggttgcaaaaggaggccatgtcgagggagcctaagttgcttgagttgcttcacatctcttcttgcatcaggcacccatgcatgtttcacctgttattgtaggatctgtaaactttgagagtgtgagcaccaatgatgaatggcaggtgttgagaccacaatggacgaattcagagtacctagtcagtcaccatgtcttgtccctcattttatttgaagaatctggtgttctccctcctcttcatttgcacggatgctgacctctgttgaggtactcatgtctgcaccatgacttgactttatcttctagtttgtgttaaaagacagtaactttcagaaaaagacaaaatcctgacttttatacagatatgaaatgaacaagagttagtaattttttctgttaatacttaccaatccatgagggagccaagcagatgctgtaacaaattctcaaggaaaatccaaaaagcagattcactgataggtcaggaatattgaagtgaatgtacaaattgagtaaaaccagacccccccccccccccacacacacacacacactgcattactgtcatttacctagagcttatggaattgcagcagttgtaaaatactcccttataaccacaatcagataacctggaggggttctctagggtctagacaatgtaccatattatatggaaacacaacgtaacatttttccctgtgactggctggtcacattgcggttgactttgaccaccaccaccaccaaaataaacttgtataaacactgctttcaacatttgactcattcccaccaaatgttccttggctttccatcatagattctacctagtgtaaagtcttcccagtcatctggtcctttggtaatcgcttccattgtcagcatcacatgccgcttctcctcaaaacacaaaccctactccagtcagacgggcttctccactctacatttgcacaattcttccttcagccaagctttacgcagatctctcctttgttgaaaaggttattctgccttattaagcctggtcttttctgatcccctgatgggtgtatcagttgtactgagcaaaccatcacttaattacctgctttcttgcattattggggttcactttgtgtttgctgatttcaatttgattgcaagctctttttttttaatatcccaccctgcctaatagcattatgagcatataaaagccacctgttatatacttcccactctgtaatgatccagtctttggataccatccatttgtgtgattagaacaagaattgaataaatgaggagagacagggaaaattttcatttcttaaagttgttctctaaaattaaaagcacttacctgaatcttaattctaaaacctgcccccaggagatcccaaaacgttggtcatgactctgtcttgactgattgggctctccctgattgctgggtttcattttagaaagaatgtacttaatgggagcagaaaatcatttgatattttatcattaagccccttcagagcaactgttcgagtaactataaaccacaaaattacattttatattgtgtccaaaaacgatagaccagtttggaaagcaaaaagttaacttctctcagtccaaagtgaagtgagttgggaactccatgcaggccaagagagggaaactgaggctgttcctcgggcttgctgggggagaccttccttgaagccccatgcagcccctggggttggcaggtgccataagttctagcttggattacagcaaaggagaggatatgatttttctcttcctttatgaagacagaaatttgtgtctgttttattcgcttctgtctccacatgcctataacagttctggcttattttaagtgctcagtaaatgtttgctttcgaataaacaaatcttgtttttcattctctaatcagtgtaacatctttatagtttctgagtttatagtttttgaaaatcccattttggtggaattcaaatgaaactgttttctctaatcgagaaactcaagaaacccagttgtatgagaaatgtccagtcaagaaaaaaaaagaattaatataattacagccaaaatatgacacgtgtattacatatttacatacatttatatgcctcacatatattttaattgatagaaatctgccttctacctataagtggttacgtttataagtgttctattaggttcttatggcacaggcttttgttgctgtaaattacaactgactaaaatctcacaaaattatttacttattaaatacagctttcataataattgtacatggcacatatagaataatagaagtcatttgagacaaagctttgttttagtgttggagctttttatttaaaaaattcttacttataaaagaaactttcaaatgactcaaagtaaaaatctgcttatgttaattattcttggtccactatcaatatccacagtgagctagctcctgaaatggttattgaataccttttttcctcatgtcaactagaagccaagttgcctccagtagttttcaggccattttttttttcctttctgcttgaaatgaacatttcccaccggtcaaattagacaacagattaccaagtaaatttatttcatgtatgagggcttctggaggagaaagtaaaccaacacataaatctgtcttaaaagcagcaaatattttattgatccccatttgttgaaaaaaaaaagctctctaagccaagtcccatcaaaaataacagttaggtggaaagatccttggtagcagtagaaatggtctttcagctctttagagcagtaaaaacttactatgaaattttattgctaaacaccttagttaaaattaaactatctttaaaacagaatatttaattggagaatttccccctatatccagtattataaagaagtctgaaatttatttggtgcaaacattcatagtatattttattctatgggatttttttttccccaggggcctcaagaagatgatttgtagtttgtactttcctctgggcagttgtaacctttgggtccacatatatgaattatgagaatgccttcacatataaattatgtttattcctgtcattgaatattttggcactataacgttgttaaatcactttagtaaaatttggaaatagagaagtggagggcgtcaactatccaatgtcccctggataggaccagcaatgaaagcctgagccaggacattctgagtgtctgtcagccccagagcccacacatttccctgttcttcagttgagctggggaccaaaggacatcctgacctggatactaggcagctgggacttttctaaagggagatatttagtctaggtctggctttagacaggatgtgaagaatttaggccaatgttataggaagaatgtgttacctaccacaaggcagggagaaagagaattgggagctgaaaaagaatccaagttggactgacaagctggggcacaacagtttgcagactttacaatgaggcagacgtgatgctgactttttatgcatgttacctcattaagtttgttccctgcaacacacttacaccttaggtattgttactttgttatgtaatggtaatggactgttagctttaaaaagtccatggtgtggtggctcatgcccataaccccagcattttgggaggccgaggcaagcagatcgcttgggctctggagttcgagaccagcctgggcaacatggtgaaaccctgtctctactaaaaatacaaaaattagccaggggtggtggcacatgcctgtaatcctagctacttgggaggctgaggcagaagaaccgcttgtaccggggaggcagaggttgcagtgagctgagatcacctcactgcactacagccggggcaacagagtaagaccctgtctcaaaaaattaaaatagaaaagaccataattcacatgataataacaatcagatatcttaggatccaaaagctttttttgcatatttatctgttttagtcgattaaatttttctatttgtttacctttgtgttccttttcttctaataaaattctctggagaatttgcgttaatttcctccatgcagtaggaaaatggaaaggtacagggcttcacacctgaaatagtcatggagtgagactagaattcctacagagcccaggagttatggtgatcattgagagtacatgtagagaatcctaaaagaaattcggaattcagactagattcatatcaccttttcaactggccttcctgcctaagttctgttaagcttttctctttcattgtatgcattgctggcctattatggatagcaaatagctattttcttcatagaaaatattaggagatacataaaaggcatatcatttgaagagcagtgattggcttttaaccatatgattgttcttgttgtttttgttttgtttttgcttggcatatgacctttatgccactcccaagacagtagggtatcatggcttgtttactagaaggcctacagtgacttccatctgagctacccccagagcttgagatgggacactcagtgaccagatggctaatggcaggacaagtatgtgtctgtgggagtcctgtgcaagtctattgcatgtacacaccggtatatacactgtactaggtagagtggccgcagcttcatgggactcttcccaatccaccattatttggcagctaccatgctgtgaactgagagtatactaatcatgtaaacatttgggaagaaagactttttaggaaagaaatattgttaaggacccatgactcaattcagtataatcgaaaacactctccagatgtgtagcgtctgtttcaccacagaacaaggggtttgctgctgcagcagtcctgagcccttgatttaggatgggcagagcactagagctctgctggagaggctatacattttgacagccagagccatctccatggttttcatcagtcatggccctcattttgcattgtgatatgtgagagagaagcggaactaatgaccacacgctctaatgggggattgtacagatacagctgcgggccttttgtatggttggctaagattttagagtctcttgtcttgccccagggattgtgcttctgttgagattcgcagaaagataacctaaagaatcaggagctgtcatttaggaaaagttctacagacaaatgacttattatttggacattttttcatatttttcctctgttataattaacgtttatagaaattttgactgcctgaggttaattatacgtaggtgtgtacatgtagatacaaatgtgtatatataaatacttctatgcatgtgtgtgtatatatgtatatatatcttggtgtgtaaactaaactggttataaaagagttggatgcttctgggaaaaggcagctcagtatcatgacactgtaatgcagcacattttttccagagttatgtgtgttctgtgtcgatgacttttcctgattttacccctctgattgaatttcaaaacagcataaatacagtgagaaagttttttatggtcttctgagtgcaaagaggttaacctctagatttctgagctgtgaaacttgggatagaaatgagaacatgtctcttatatcatcttatactatattaagctcttggttatcaattatctgagctactactaataaattactaggtgacatgcaagttggtaaaatgtatttgggtgcttataattgctcatggtatgtttctaatgttctagaattgccttgcatttcaaataaattcagctacccaccaggattgtcattaccaccccatattatttatttatcattattctagacattctggccaatggagtgtggtataaaacaaagtgaactataaatattagaaagaagataaaccaccctctgtggaaacaaagagggtcagagaaattgaacaagtcatttaccaaagaagaaatacagattgccaacatacatgtgaaaaaaatataatcttactagcaatcaaaaaataacaggataccatttttcatctgtcaaattagcaaagatgataaagtgatgatcatcattattgaaaaacatctggtatgtcgggggagtctcccatgtagctattggaaagaaagatgggaaaattatttctgaaagagaatttaatatatacatcaaaatcttaaagatgcccatagtcatctctaccacagctccacttctaggaatttactatcggcagtgtctcctctcttcttttgcattgctaatccctttgagaatctgatgaaagtgatgaatcctctcttagaaaaatgcaaatatacaatcaagtttgcatttaatttctcaggtcctgtggtgatcgccaaaccccagcaaaatcacagcaccctctattgcaatattgattttgcgtaacacccaaaatactgttactttaaaaactggaaggaatccataaactcgagtctgggaaactttaatacattttacatattaaattagaaaaacaaggcacaaagtaaaattttacatttagaaaagttaaaaaattaagcacatattatcattgtaacatacattactagccgctgctgtctgcccttccttttgacttctaccccaccagagctgcagcctacatggagctgatggaatttcagtcccttcctgccgtggttagtgcccctgagtggagttttaagaaccaaattttgggctggtccttcgctctagccagcaccttccacttgcaaattttgctttttctctttcctctaccaaggagagggatttgtgagagcaaaaataaatgccagcacagaagggaattcaagtcccctttgcaatcgagagaccctccagaggattccctcctcctgggccaagtgcagcattttgttaatgtttttagggagtgagggctgcagtgcagattggcacaatgtggatgggaacaatggggtgatcaagcttggtaggtagtaaaaaaggctgagacagtgctgctttaaagggggttcctgagttaggagaacatctgtgacttaagccaattcagagggattttagaatgaggggaaaatcactagatcctataccatgctgttgtaactgatttattcacacccaacaaactgtctcagagttagaaaataactcttggtatgatgagtagaatgtatcaagaaatcatctgccactctgaggctcaccctaaaaagcaaaatctgtggaagtgacagtatattgtcataaagggacatcttggtttcttcacgtcagcagtcttactatgcagactctcctgcttttctttttttgtgattgcagcatctctggctgagatcttacaccaagatgtagaacagcttcttaaagccaagccattcaaaaacctttgttcaggctcttgggctcagagggagagtgtctgaattcagatcccattttgtttctaagaggtgttgtgagagttgggtaagagctttgattccgaactgcctgtgaatcaccggacaaatgacttaacctctctgttcttcatttcctaaactggtgtataattgggtataacagtccttattttccaaggctactgtgagaatttaatgacttcatacattaggcatataaaacagtgcctaatagcactcaataaatgctaaatgttattattatctttatattttggatgagatccataaaataaatagaagtcctataaattcattataatataactacctggtgacataaaactctctttaacttttattttgtttttattcctttgttttctaattagatcattacttagtgtgatattggcttccagtggattatgtttttgttttgtttcaatcttactgtgggaccaaaagaccatctatacctggctgaactaggctttctgtccagacctttggcctgggtgtaaattccttttgctagcagggtgggggccagatggaaggatcatctcaagggaacctgggcaggagccctttccagggttgattctaactctgcatggttctggaaggccaacggttgacagcagggtctgtatccttggcatgaacattggtgttaccctcatggatgtgatgctgctccgaaatgcatgagcagcggcagacaggactggggaggaagaacatggtggtgttaaatggtgactacaggctttgtggggccatagaggacatttccttggaaacaccctgaattaactgcctattcttttattgggagctattttgcagctatcaagatggtaggagatcttgccacattatttgcatgtacataaactgagagtgattcaatttttataagcacaggctgggggttttgggagattgaaggttcatgtgcagtcaagaacgagtagaccgttggattgcagaacattgagtttaaattgctgggattttctatgcattttgaaagcaagatggtatcgtcaaattgtaatttttgtctaaaccaaaatctaacagcgagatcaagttgtttggagtgactgtttgggttcctctttgaatctagggttctagtctgaagaataaaaacctcacctgtctgcttttggaagctgattgtgggtaggggtgaatttaattcatttagggatagtttttcattatctagggcttaaattatataattttttttttactttttctgaaagaaattaaggtaaactaagaaagaacttaagatttttcaccgtaagatctagccaagtttattaatttttcctctatatacctctccaaaaagaagagctgtttgaggcatgttttaaattttttttaccacaaagtgcgttttttggttccccccctcctgactcacacacacacacacacgcacacacacacacacacacacacacacacacactttcctaatttagggatgctgaagtttcagcatttaccaaaacaaaacaagaaaaccttggaggaaaagatgtttaggaagttagttatatgtgtatgtctgcgtattatttataggactaagctttgctgagaaaatgtagcattctttcatcttgtttatttttttaatacaatctactagttaaagatgaggaaatattgccttattgcagcatggttcccagcagagtcggggggttcgttgatggaatatgtgagacgctgcaaaagccattttttccttcaggccctgattgaattgctaccagccaggggcagaacgatggtggtcagagatgggctatgtcaagtttaatttgggctgtggcacttaaggcaggcagcggaggccttcctgtcacagagtgagcctcagcaattgcaacctattctgtgactgccaaatcaaagcatgttaagtgaccaggcaagggctctctgctcttgacaagacacagcaacagtgactgacagagaaggctgtgggagtggcccagaagggcatgctccgtgacagtgtgctgggcaggcaatgcagcaccttggcttgagacatttgctgttgattgaagtctcctgaaattcatcggtgtgttcacaaaagaaaggtttcctcatcaattcactcccaccccaaactctgttttgttgtatagcccatgcaaggcactgctcactgttactttctgagaatgttcacaagttttgtgcaaagcacttcccaagtaaaataagacatcactgccacctgtgatagcagagccctgaaagcccagaaaccttgaacaaaggaacagaaccatggacacaagtcaagccaccagcagctcctgttcatttgaaccaatcattaaggaaaattaacttaggaaagagcataagtatcaggttggccacattttaggttacatggacatctttattatgtttattaggatatcagtcattcactttattaattgaaattattattaatcaactattatcacttattcaccaatagaccaacatccaaaagaaaaataaactctccacataaaactagcctgaatcgctgggcacagtggcttttggcctgtaatcccaatattttgggaggccaaggcgggtggatcatttgaagtcaggagttggacactagcctggccaacatggcaaaaccccatctctactaaaaatacaaaaattagccgggtgtggtggtgggtgcctgtaatcccagctacttgggaggttgaggcaggagaattgcttgaatctgggaggcagaggttgcagtgaacggagattgtaccattgcactccagcctaggcaacagagtgagactccatctaaaaaaaaaactaccctgaattttaaaatatttaaaaattgtaatacctaatacgtttttatgccattaaaatgttggacgttaaggagaattaatttattttttattcgttagtctttattgggctcaagcagtgtgtggcatgctattactatgactcacatctctacattctaggaatttacactttagcatgggctgttactgtgaattcctagacagtcatacacaaagcaaaatggaggggcctggcaagaagcataaagcagtcctgagtccaaggggcagagcgaggctgtgatggccatttcctcaggaaatgatgagcacaaagacttatcttcattattgtccattgtagaacttggtgttacagggaaatcaagtttgactttccaacttagattcagtatcaaatcactagtgtagagtttgagagctggcaataatggagggacatttggaactgtctctaagataggaaggagagggacatgcagggctgtctctcaactaggatagtgagggagagcatttgtcggggaagcaggggagaggggccaggtggtggtggagtgcaggtcctacctttttcttggtgggatgggcagagaggagctaactcagcaccagctctgtcaatgatccgcctctgtattcctgcaggatatagattgccctttaagtcctggtagatcttctcacacaagcatctcagcatcctcatgcgtcaggtgatgggggaaagcaggaacacccaggtacaccagcccaacagaagggttttgggaaaagcacagtcgaaaaagtcaatatgcaaacagccacatggaaaatccagagtttacaaggacattcatcataaagagacatttcctaaaacaataaaaataaagttctctttaaaaagagatctgctttcctggtttaaatctgtgagtcacggtttctgtatctttgctttacacatacaaggtcctgaaatatggaaggggcccagagaattcagataatcatcttttaaaggacttcaaaggatttgagctggatgtgtccttgctcttccttggctggccacagagccatttcttctaatgtggttcacaggtctgccccgggcattgccaagatgcattttctgcttacctaagccgatggcttccatggctggccaggcatggctctctccttctgaatgaatcagaaggaagcagttctgaatctgtctactagacagtgattgcctgctttgccctgctagtaatgtgctgctgtgtcctaaaataagaaaataagactgctccctggaccactgagaaggtgcttcttgaaaaataatgaaagagcttcatgcttttccttaatccatcatgatttgaaacttttgcaccagtgcaagtacactctcactaaaaataaatgtgcttgctgaagtagccgttcgtctcaaaatatcctgagtccgcttcgctctttattcttgttttccaaacattaaagaagagaaaagcttctttttttttcttctcttaagaatacacttcttggcaatgactttaactagacaccattcaaaattacaatccataagcctctatattatcagtactttcttctgtatttctaaatatttgatatcattctcccttcttaaaaagaaatttctcagctaggcatggtggctcacacctgtaatctcagcactttgggaggccgaggcaggtggatcacctgaggttaggagtttgagatcagcctggccaacatggcaaaacctcgtccctactaaaaatacaaaaattagccgagcttggtggcgagcccctgtaatcacagctactctggaggctgaggcaggagaatcgcttgaacccaggaattggaggtggcagtgatccaagatcgctccactgcacttcagcctgggagacagaacaagactccatctcaaaaaaaaaaaaaatttctccctttctcctctctctctctttctgcgctaccccctttctctctctctctcaaaaaaaattaaaaaaaagaaaaaaatctaataggaaactcctgtaggatttttttcaatgtaataactctaatatggagatgaatagtaacaatattgtcaaattgtcacagtatttccttggatcagctcattaggtaatagcagaaaatctgtggttccaagattatgttaagaatatgaaaatgtaacgggactagtcattaaaaattactttcacatcatgcattgggttctattttgtaaagagaaggtagaatatgacattgaaagcttttgagtggtcacagattttattgccaaaggtactatttttaacctggtgtattttccagttaaatccctggatacactctcctcctcctccctcagccctcttcttgccacacacatgtgtgctccaggacggtcagagtagaatttgtcacatgtcactaaaatagattgatccagccagcatgagagggtggattttgatcacaaacaggtcttttgaatatatcttaaatttactcttcaggatatgaacattgcttagtcaactgtatatgctcatgaaaatcttcatctttttcacttaaattaagatggagccaaggacacgtcttcattgatattccttttagctttttattatgaaataattttaacaaaagaagttgaaaaattattataaaatatttcaatatacataggtttctttttcccatttccccccaatatttatttactttatcatttatattctatatgtatgtgtatatttctatctttttctcttacagacacacaattattgtcttttgaactgtttgatagcaaaatgtagacatgatgtctccgtacttcagagtatggtttctagaaagtaagaggttctcttatccacaggacagttatcaaaatcagaaaattgacatttatacaatactattttataatctagagacattactcatattttcacaattgtaaactattgtactttatatcaaactaaaagtaaatgagtgcccgggaactgatccaggataatgagattggtctcattaatgtcctttaatctggagcagatctttattctttctcagtctttctgacctttatactttggaagtttaagcaatgcccttccatttggatttgttcaacatttccgtaagattgggttcagggggttggcaggggggtaatggaagtaatgttgaattcttcacagtgtatatgactttatcacttagttgtgatggggtgtgttagatttgtccattgagaatttattgctctccatttgtaaataataggtgtcttgtggaggtactttgtttctgtgtaaatatccaatttctcatcagatgtttagtcccaaattttagcatccactgatacttcttgcctgcaacatttattacttcactgggagtcaaacggtgattttctagtctcatcgcctcttttacctttattagtttgtgttctagtataggaacttttctttttcttcctacaatttattcatttatctatttatatcaatattgattcatggattcctacccattctgtgggttgtaatcattactataataatttactttgatggtctaattgtccccagtttggccagcaggagccccttcaagtgcctctgtcgtttgaacatgtttatatcattctttgggcactttcctcctttctggtaaagcgtgatgttccaggaccatgtcactgttttgtgtgacagccctgaaacagctctgtctgagtagggatggcttcttttagtggagaatgatatttagaaaccaagatctgggctttagttacgctcacagtgactggcacattactgctcgcagggtgctaggcacagctaagaagtatatgtatatatgcatgtacacacaaactcacctgtatattgatgtcagtgtctacatatctagatatattgaaagccatggatttggaattactccagttccactctaatgtcccagggttctgtgtagcctccctgctttgcatatttgtaactctctttaacaatgagaaacatggttctcaacatttactatatagctactttttaacttatttctttaatacacatgaagtaagttcagcattgtaagtctatggcactttgataaataaacctactaactaaagtacaatgatggtttatagtttttctgtctttagccagagggaatattgtccaaatactgtgttaaaatgttatttgagcttgttttttcctctcttcactgcagttatgtttttcatttgcaatccagttaggtttactcatttttactttggttatatgttgaatattttctccctgtttctcttgattgtgttaatttttgtatccatgattctgcaagtcacaactatacaaaaaggtatagttaaagaagtatcacttcttcatgccttctacccattcccacatccccattattttaactccattcccaagcaaccactgcatgttggtaatcagtttttttcttctggtttcttttttcacaaacaaatatataaaaatatacactttcacttcccctacttgcttacacaaaacaattttttttactttgtttgtttgtttgtttgtttgtttgttgacgatgtcttgctttgttgcccaggctggggtgcagtgccgcgattttttttgtatttttagtagagatgggctttcaccatgttggccaggctggtctcaaactcctgacctcaggtgatccgccctcctcagcttcccaatgtgctgggattgctggcgtgagccactgtgcccagccttttttttttttttttccacataacaatatacccaataagtcacttcatgtaagtacatatactctttctcactccttttcacacgtggaatagtagattagatggatttactgtaatgtattcaactgctttatttggtatgagcatttagattgttttatgtatcttatgattacaaataatgcaacattggataaactgtgattatgtattttcatattgaagagtaccttcattgtaaattcctaggtatgatattgatgattcaaaagacatatagagttttgttatagaatgatagttcccttccaaaagggttgtactaagttgcattccaaccatcaatatatgagtgtctgtttctctgcagccttgctaacagaacatgggccatacattttacttttcattagtatgtccggtgagagaggtatctcagtgttgttttaatttgcatttctctaattatgtgatactacgagtagatattttaaataagaatccgtcagttaagagataatctagggatttcattcagttttctaccaaatatattaatattctagttaaccgcacatttttaagtatatatcaaatatttttgttctaagtttaaatagttgcaagggatataatttctagcatatgttaaagactgtcattttaaataattttctacatggctcttttagatgtagctaatataatctaaacaccaagctggcatctctttaaaattatcatgaacaagctcttctttaataatcataaattttatcgttgtttttccttgaactttaatagcccttctattttccacacagaatttcaacctaatataagtttatggttcagtcttttatatgttactctgtgagattacacaaagaattggatattcaaataaaaaagctcatctagtaccaaactttactaataattacaaataaccaaataattagaaagcacaagcaaaacagaatgtgagctaggactgtcagtacagcaccctcagtcctttctcgctgcgttatatatggtctggctcaaatcggcacggaagatacctaatactgtatacagtggcgttacttaagtagagggcacccttttaatcttgaaacatctccattttatacttagttacattgtgagattctttcttggaagctatatgccataaatccacagatttcaggtttgtttaccgattctaggcaaacaggtatatcctacaaaaagaattccacaggtaaggatttgcttacttgcaaacagcagaagatgtggtcattaacaagttgacaataagattagactaggttctttctttctctagggttacctccctttctgcctcataaagggagagagtggatttcataactgttgcttaatcatttattgtctaccctgtcatattttctctgcaagaaaaatatataagcaattgaaattttcaaaaattattttctgtaacaatacatctttaagtttaaatatttctttggtttgagttatccttacaattagtattaatatccattgatcagaacaacataaatatatgatacattttgataattataaataaaagtagtccctgcccctaatccctgacaaccagtaatctgttctccagttctaaagttttgttatatcaaaatttatatataaatagaatcatatagtatgtaacctttggaggatgactttgactcagtataattacccccagagattcatccaagttgttccacatatcagagtttattccttcttattgctgagtggtatcccatgatatggatgtaccgcagtttacttaaccatttatctgatgaaagacatctggactgctagtttttggctattgcaaataaagttatgaacattcatgtaaaggtttttatttaaatatgtattcatttctctagaatatataacaattccaggtctaattagcctcagtgtacctctccttcttttgttccaaatctccactggttgcttactagaatctctagacttgtagccagtagatttgtgtgtttgtgacctctaaccacatgctgtctcaacattattctttctaaatgtttagtgccttctgtgatccattcctaatgagttgtgcacgaaggaaaatgaattgataaagtgctacaaggactaaaattggtgacatttttcacctgccacactgtttgtcccttgaatccatttgtcaggatgactcaagcagtgtgcttgatactgatttatcatttagagaattttctcgttgtgaacatgttagggcctagagagctctgctgaatttctgtcgcttttcagcatactcttctgactagaaagcagagggagaggtatcagacctgtcaggaaataaattgttcttgggcctctgggtggaacagctccaggttttatcatcctaagtccagctcaccagaaggggccacatgaggggatgtgtatttcaatgtggtctcgtttttattaagtgactttgtcttcaggggcacacttcagtaccttcaagataaatcgcttctgtctttgacagtgacaatgacaatatttccaagcttcacacatccaagagccaattgacaggacaaattgcacatggggactgcttggtaagtgcaaaatggggcacaaaatctcaagtcaccctgcatcattggaactaagttctaatacaagtggcagaaataaatctgtcactttactacctaattgtgggacacatgccgtatttaacagctgaaggaatgttcacctctttgctagagttcaaaaatagtacttagttattccttgatattgggtcttggtaaatttgctttttcctccgtggtatatatttctataataaaaatagatttcctaataaaatttctattaatatttttatagattatatcgacataatctgtgcaaatacttagggaaaagtgctaagcattttttaaattttctcaatatttttagccttaggaaagttactgaaataaatatctcccaaccaaggcatgtgcatatatgtgccctagagattgtgtactttataaaatcggcatgtttgatactattaaaaaaattaagagtaagtctgtatgcctttctgggtcataatcattccatttagaaaaacaaaccaaaacagactgttaaagtcagaggaaggccttgtttaggcagctaagcttaccctctacttcgtggtcaggcaggttaacctggctaagcagacattaggcagaagacttggaggggtagccccatggtgaatgacaattagtaggcttcatcccagtctagccatgggacagctagatccattttcgggtttttttgttttgttgtgttttgtttttttgagctggagtctagctctgttgcccagaccggagtgcagtggcatgatttcagctcatggccacctccgcctcccaggttcaagcagttctcctgcctcagccttccaagtagatgggtttacaggggcctgccaccacacccagctaatttttgtatttttagtagaggaggagttcactgtgttggccaggctggtctcgaactcctgacatcatgatctgcctgcctcagcctcccaaagtgctaggattacagccgtgagccaccacacctggcctagatctacttttatcctgatgaagtgaagtagatctgccaaaagacagaccccaaaatggtatcagagactcactctgggaacaaatcaaacaaaagaaaaaacctagctttgattcagagtcatatgagcttcctgaggatgacacacagaagcctgtagggctgaggagtaggactctggagccattgcaaccataaaggatgcccaggcctgctctgagctgagaccaagcctcttgggttggccttctgagggtttcaactgcctttattgagggatgtgcacagtcctacccaccatagtgttgggctccaagagcaattttttagcatgtgttgtctagtatgttgatatacaatgcacgagaggcagggtaataaccagcatagcacagatgtaatgtttgctttttggaattattctttgaagtgggaatggtttgctttgttaaacaccatttcagagttctttaggaatatgatgtctgaatattaactatgcacactgtctttttctttcaatgattgatgcattataatctaaaatccttgggctatgcaaacacatctctggttaaggacagtttacctgcctttgacccaaaccaccttgcaggatgtttaaaaagccttggtagggtgcctattgctttttgctgtccctgactaggccttggtctcagtatggacatttgaagaaatggccagagaaaaggtaaatgatataagaatggaaactaaggtgtctgaatcctcttcaagtgaagaaattaaagcagtggaaagagcttttgttttgtggtggaggacttgggttctacatctcacttttccgagaccagctgtgggatttggggcaagtgttctcagatcttttggtatcagaatcattgcatttgcaacaaaggagtggtgttaggttggtgcacacacacacacacacacacacacacacacacatataaatgattggccccatttatatgtatgtgtgtgagtagagggaaggaggggggtggagagggagagagagagagagacagacatatctttaaaataattgactcacatcattgtaggggctggcgagtcccaacattttaagggaaggtgggcagacaggagatccagggaagagacgttgcagtcttgagtcagaaatcagtctagaagcagattttcttcctgcttgggcatctgttctctctactaaggtcttaaccttattggatgagacctacctacattatgaagggtaatctgctttattcgtagtctattgatttaaatgttaatcacatctaaaaaagaataccttcacagcaacatctaggctggtgtttgacctaagagtgggcaccatgccctacccaaatccatgcataaaatcagccatcactgtatctaatgatatgccttattatagaagttagcttaaggagtcacatgctgagatggaaggaacatttttcttagagttgggagacatgggcccaagagctgattctctcactggtgggctctgggactgccactgacttctcagtggaaaatgagtggcctagttttgatcactgggttccaatgtgatcactgacaggtacacattttccatcataggctccatattttgagcaattttatttgcccaataaatcacattatgtaaatgtgagttcattttttgcttatacatatatatatatatatacacaataaaggagacactgtcagaaaacaactttccttggcccttttgaagtattgaaaatagttcccagattaccactcccctttgctattgttatgggtgtctccagggtacaggaagactgatggaggaccctgcaactccttgatggctgatgctgaaactgggcagggagctccaggaggaaccagacaggatcctgttagcaggctcaccacaagtctaaagggaccagccttgagaagggcagttgggatgtggcaaatgtgagccaggtttctgggtcctactgtccaggttcaagttctggccactctgtgaccttgggcaagttacttcaacctcttacaagttccctaatctatagaaacagctagtacataccttatggaattattatgaggattaatgatccatataaagcatttagccaagtacctggcatagagtaagtcctggataaatgttggctgttggttctgttcctgttagtgattcccaggaaccaggaattggttctagtagccccctttgtgtcttccctctgcattcttctagacctccaaaatttattattgtgccgacaataatttcatagatttcactatgaacagcatctatcctttaataccttcttcgtggcttaaagcttgtaatacaggttcatggtcataattatcgagtcagtgtttgtggtttagattgttgggaaattggcatgcagatccatctccactcttcaaagtgcccagtggattctgtgcctctgtggccagcaagaaaggagcagattcaagctgaggtcataaatctctatgttgcaccctttgccttttctctggaatgtgcaggtgggaatccatgtgatggaagaagagcttgactctggtattttgcccagggttaagagcagcttttctttttctcatcttctgccttggagcccaaaggctattaggattcccagcaaagtttcctccattctcttttcctatcatgttattttatgtcagctgggtacatattgtatgtcctacagacaatggaaaaacagtaaaatatttttttaatttttttattatatttcagttctgggatacatgtgcagaacgtgcaggtttattacataggcatacacgtgccatggtggtttgctgcacccatcaacccatcatctacattagatatttctcctaatgctctccctcccctagccccccaccctccaacaggccttggtgtgtgatgttcccctcctggtgtccatgtgttctcattgttcaactcccacttatgaatgagagcatgcagtgtttggttttctgttcttgtgttagtcacagcaaagtcttttatatctcaagagagacctctagaaggtctttattcttggcttgtcattcttgagaagcccagcagtaagtggaacccaagctaagcttgtgaagctgggctcatccagcttggaaagtcgaagaactccaggaaagcaggtgcttgggttcttgcacaatcatccatcccatcttccatctttgtttgggaacccttgacgttacccttttgatcccactctccagtctagcgtgaggtgagtcaggttcaaaacagcagcttctcaggccagaatgaaatagcgaccggccaccaggggaaacaaatggtactgctcaaccagaaggataaatgtcgggcaaccaagtttgttttgccacagatgagcagggaatggtgattcatgaatgcagagctggctggggtgttggaaaactcatgagttggaaggagagattctgaggacactgctctctcctgatccgacgctgttaacactgcagacactctggcgggtcccttggcttcacagcctctctatattttcacagtctgtgaatattctcaaataacttcttcagttggggttgggcaggtccatttacacacactgcaaatgtctgtgtttgggagatcagtttatgccatggaatgacacatggggaaagtgttcattttatttctctcagaatgattcattggtaataagtttcatgcccaatgcctgtttctgcaaccatagaaaagatgctggtatttaccgcaatttccagctagttgttacttttcctgaagacccctcttgtcatcttccaagtccctttgttccagcaccctgggtggtgaaggctcaaagaaaaatctgtgtatcattttggacacattttgtgaccaattttataagttggtgttttctgtctactttgtggctctggaaggttgcgactcttaaagacagggcctattattcctctagaaagtattcacctctttcatagacaggataacaggattctccttaaccaaacctgacattggtgcacagctatgttagttgcggaacctccagaagcagccttgcacattgagttctgtgttcttactcataaggaggatgtgctcacagaagaatattaaagggaattttcccacatgagagaaaccatggcaggaggggacctctctatttatatttagagtgagtccctgtaacagtgttgatatagaaatatacaggtataatggcccatatacagggccataaacagggtttctgtttattgagatgggggaactccatggcccaaatacacagggggcatggttgcatgcagagcataactgaatcattggtattttgagacaattaatttttttaagtttttactcaatttcccttgaaaatcagagccataagatgcatttctattaaaccgtatacaaaaaaataaagagggaagttcactttttgaaaaaaggtctgaatagtgtttttcagtgacttacagtcaacattatgggttaatgccaaactctggagaatttaatgggagaattaagaagtatgtggacaggcagtaagtaattgacttcctagagcaaagtgcacagacataggtcaggattccggaacttgggccattatggataacagcagggctgattgaaaagagtttctgaggggagacggtcttgctacgtcattttatccctttgcattccatttttagggacacgctatttaaagaattctttccattccatttctaggaaaccccattcagataattgttttcctatgtttctcttttcctttcttttcttttcctttctttccttttctttccttttcttttcttttttgagacaaggtcacactctgtttcccaggctggagtgcagtggtgcaatcatagccctctgcaacctccgcctccttcaggttcaagcagttctcctgctcagcctcctgagtagctgggactacaggcgtgcaccaccacacccagctaatttttgtatttttcgtagagatgggtttcaccatgttggccaggctggtcttgaactcctgacctcaagtgatccacccactttggcttcccaaagtgctgggattacaggcctgagccaccacgcccagcccctatatttctttaagaagtgccaacttgttaacaatatttcttttttttttttttttttgagacagagtctcgttatgctgcccaggttggagtgcagtagcacgatctcagctcactgcaacctctgcctcccaggttcaagcgattcttctgcctcagcctccccagtagctgggactacaggtgtctgccaccacacccggctaatttttgtatttttagaagagatggggtttcaccatattggccaggctggtctcaaactcctgaccttgtgatctgcccaccttggcctcccaaagtgctgggattataggtgtgagccactgcacccggccattaacagtatttctttgaatttatataatctcatatagataatatatttcgaatttatataatctcatataagctacacatctgtgctccactcatctctccagtacacctccaaaatacaaccttatttctttcaaaatctttattttataggtaatacatatttataaagatttataaagaggaagatattttctcttagttaccaaaattttgctactatgaaatcggttttcattggagtgaatcgtctacaactttcaataaagttttttagaagtatttttaaattatgtcatgatatatatttctgtatgcaatttttagaaaaatatcagagagagagaaagtgtgcctttagagcaaatcaggattttttctaccaaacataaaaacagttatttctagtttcagtgaatagtaaaaataaatatacctcatttcaggcactaaagttaatttcctccgtatgcttttttccctaatttatttttattttggtaaaatacatacaacataaaacttaccatcttaaccatttttaagtgcacagttcagtgatattaaatacattcataatgtacacaactatcaccaccaaccatctccagaactgtcttcatcttgcaaagctgaaactctgcacccattgaacagtaactcctcattcgtccctcccccaatcccccggcaaccacaattctaattggtctgtttctatgatgttaactactctaaatacttcatacaaatagaatcatacagtacttgtctttttgtggctggtgtattttacttagcataatgtcatcagaattcatccatgttgtagtatctgtcagaatttgcttcctttttaaggctgaataatattccagtatacattatacatatatactgtattttgtttattcattcatctatcaacggacacttggatttcttctactttttagctattgtaaatagtgctgctataaacatgtgtacaatatctctttgatatacatctttcaattatttggggtatatacccagaagtggaactacagagtcatatagtaattctacttttaattgtttttttttttttttgagacggagtgtcactctgtcacccaggctggagtgcagtgatgtgatctcagctcactgcaacctctgcctcccggtttcaagcgattctcctgcctcagccttctgagtaggtgggattacaggtgcacaccatcatgcctggctaatttctgtatttttagtagagacggagtttcatcatgttaatcaggctggtctcgaactcctgacctcgtgttccgcccgcctctccttccaaagtgctgggattacaagcgtgagccactgcgcccggcctctactttgaattttttggagaaccgccacgctgttttctacatggtatagaaattgtactgttttaaattcccaccgacaggatacatgaattccaatttttcttcatccttgccaacacttgttattttctgcttttttgatagccgccatcctaacaggtgcgaagtggtatttaactgtagttttggtttgcatttttctaaggatggtagcatgttttcatgtttttttttttttttggcttcaaaaaatatctattaatttccattgcccattttttttttccccagggattgacatacaggaactttatttttttaaagctttttttcaacttttaggtccaggggtacaagtgcaggtttgttacatgggtaaattgcgtgttgccgaggtttggtgtgttaatggtcccgttgcccaggtagtgagcatgatgcttggtaggtagttttcaaccctcacccccgcaaccctccccctcctggtggtccccagtgtctgttgttcccatctttatgtccatgtgttctcaatgtttactcctacttataagtgagtaagcaagtggtaggagtagtcagaggggttcttgtgttgtgataagtgtatataaattgagtgagccgcttattagtagaactgataatagccacttattagtagaactgataataggataataggatgatggctagggtaacttcgtatgaaattgtttgggcaacagctcataatacgctcattagcgcatagtttggattggatgctgagaacatgtggcatttggttttctgttcctgaattcacttcagacagtggcctccagctatgtccatgttgtcgcaaaggacgtgattttgttcttttcatggctgcgtagtatttatacatggtgtatatgtaccacattttctttattcagtccactgtggatgcctttgcccatttttaagttgggttttttgactttttgttgttgacttttaggtgttctgtatgtattccagatattaattacttattacatatatgacttgcaaatattttctcccattggatgggctgcctttttaaatatgttgacattttctatttatgcacaatttatttggtgcgtaaacaccacaatttatttgctgccaaacgatcacagattgtccacatgagtggctgagatagtgacacgtttgctttctgatggctcaatttacacgaactttgatgcataaagtgattaaaaatattgggtaaaactaatggctatgtgtataaggtatatatgaatcataatcataaataaatttcagttcaaacttaggttatctccccaagatatctcattatgtatatgcaagtattccaacatctgaaaatagctgacatttgaaatacttctggtcccaagcattttatctaagggatactcaccctgtattgttagtttttgtcctgcaatattattccctctgcctcctcctgtcctttcccactgcctctgttcctaatccaggccacccttgcccgctggctgtgtctctgctatcagtcaggcctccccatccacctttcttcctggcatcaggaaagtctgagttcacaggctctatcacatccaggcactccttggaccttggcccttcagtggcattccagaggagcaacgacgccccgattcctcagaccacatgtggggcgatcctgcaaaggtcagcctatttttatccagaggtcgtggacctcttacacggcttctgctccagggctgtcttaggctaccgctttacgtgtgctcaggttagcacagcctctttgtccaagctgattgagactttctctactacttgcctttactgtttccctcctcctttttagcaccttgacttgctgggctcctatgtagtctgaggccaatgttttgaaatccaatgcctcttcctgaggccttctgtcatcagtatgccactgcctcctccactgaacactcacagtactttgctgttccccttcctgccctttccacggcctgccttacatcagagtcatagctgtgcaggtgccaagggtgagagttttgtcctggtgaactgtggagctaggatttaaacctcaacttcacctgcctcaaagactgtgctctgaatgagtattcaattatttctttcccgtggatattcggccctccccagtttcatagcaatccccatgcctatgtgttatattgccattgtgtataagaggttcccaataaatacttctggaatgtatcacacttacacatctttattaaaaagttattttcttaaagggactactcttgtcacaaagatacaatagtccttaacttctgtgttttaattttttatatgtggcctgtattgtcccactaaatataaccattgtttggaatcattctgaccaaatgtcccctctcagttctcacggtttccacggaccctcttctggtctttctctcctcgcattcgtagtatttctatttgtgtcactaattttaaatgtaagtatatactatttcatattatttcttagatgatctcttaagttttatgcctttccataatgcctatgccccaataatagtaattctgtgcattttgtggaatgaataaaacaatgaaaggatgaaaatcccttcttggcatattataaacacgcttttaaaaagacagtatttgaatcgtttggaattatttttcttagttttcatactgcctacctagctaggtgataagccagcattctactcttgattcttctgtagatctttcatttattatcagatcaacagatgctcatcagttcaaaaacagtttaggttaaaaaagaactgggcactgctgttatttttaaaaattatcttgggaaggaaaactatcatgctttaggccataatttcaagagaacagtttttgcgtccttggcattagaagcaggcagcctaagtgaaatcaaacattgagagatttggaaagagacccaggctaggagataagtttaataaagattttgtttttccaactcagtgtccttttgattccttcctattattcaattctgtgtgtgtttggccgaaaataaactttgagtgactttatgatgttaaaggaatgccaaattatgtaaaagatcatactcttcgttttaattggggtttaaaaaaggagtaaggagagggagagtagttctctagaaattagattttaaaatccaactctattcaaataatttcaatacatttgccaagtaggcaactcattagagagaaaaggtagaaattttgatgagttattctttcagggagcaagaaagaagtgtcttcaccttcccaatgtgacaccatgactgtgtggaacagctactcattcagtctatcagaacaaagagccttctgctgatgcctcccttttcttcctctcttgcatctgcaggttacctacctgggcaaagtctccaccactggcatgcagtttttgtcaggctgcacagaaaagccagtcattgagctctggaagaagcacacgctagcccgagaggatgtctttccggccaatgccctcctggaaatccggccattccaagtttggctccatcatctcgaccacaaaggggaggccacagtgcacatggataccttccaggtggcccgcatcgcctactgcaccgccgaccacaacgtgagccccaacatcttcgcctgggtctacagggagatcaatgatgacctgtcctaccagatggactgccacgccgtggagtgcgagagcaagctcgaggccaagaaactggcccacgccatgatggaggccttcaggaagactttccacagtatgaagagcgacgggcggatccacagcaacagctcctccgaagaggtttcccaggaattggaatccgatgatggctgaatgaacttgagacgcttcagcaaaggcagcattggtcacggagttcaagggaatagatgagtaagcaacgtttcaaatttgggatgaaaagactgccaaactattggctgaccaaggtttttaaattcagaagagcaattctaaatctaaagaaatgtatcattaaagtaattacgttacattgaaacctgctgctgctgtgactgtgaggagggtgggagtgtggatggggaggaaggttctaggctctcttatttttctcatttcccaatgcctctctgtgggagagctccatgccagttttcaccacgctcaggcaaatactctgcagctgttattggatgggccattccgatctgccttatgaaattccacaagaatgttaggggcacctatgggatctctagtggggtgggcagggtgctgatggggacgctggccgcagggaggaaggaacatctcgggagggccctctgttcctctcccacggcagatgccctcctctgtatgcaaatcagcacagcctttattgagctttacaactaacaacctgatagttggcagttaattcacagttacagataatgcttttatttacataaatataccaagtagtaccctcttattgtattcacttcatctattttcttagaatacttgcaattactaatgaccccttccctttccctcctgctgccctgtccaccctctttccccttctaacatccttagagggatgaaatctcagcatatgttgcaggacaccaaaaggaagaaaacaatcaagcaaataaaataaacagtcaaacaaaccaggagtttaaaacaacaaccccaacaacagaagccttggcaaagaggaataagtgatcagcaagtgaacacactctatgtcaactctccttttatccagctgagatttatggtaacttatttaattaatggtcctgtctgatgcatccttgatggcaagcttcaaatctgatttggtatcaccgaggaaaccttgcccccatcactcagcattgcacttagatacagaatgagttagataaacttggcttgtctagagacccatgtcatcttaacctaaagggaaatcttattgcgttatcataaaattgatgatatcttagggtcagaattgccctttttttttattttgaatgggaagttctcactaaaacaatcctgagatttcttaatttcatggttctttaaatattataaacacagagtcaacatagaatgaaattgtatttgttaaaatacacacattggaggacaagagcagatgactacttttcgaagtaatgctgctccttcctaaaagtctgttttcaatcctggtaatattaggggcactgcggcacctaagaagccttaaatgagagctaatccaatctagagagcgatggtgtcagcatttcggtctgcatatctgtgtgtccgtatctgcgtttgtgtgcgtgtacgtgtgcccctgtgtgtgggcccagttttcaggcatgtagaataagcatggagtcatattgaggaggactcacttcttgaagatatgcttgttgctttacaacatatgtaagctattctttagcataaatgcattcattctttaataaaaatatgtttgcattaataaagctgaggagtttcatactttgtgtctgtcctttttcaagtaataaaaacatgaagaacaaattagatcaaatagttctatcaaaaaatatatttaaactgggtcataaataacctattcctggattgcgtttaaaaatcttgttttattttctaaatgctcaatttgtttttaatttttgcatgcccctgagatggtgaagtggcaatagttgaaatagttctatagtatggtgggtttgtttcagtgcggggtcttccagaacatgttgcaaatgattgctatttacaaaaatctcgtgtatgtctttgaagaacctagactgaaatcctggaaggtaaacactgagtgattttttttctgatgggactggttaaagaatgtctcctccaggctatgatatctcagaatggccccattaaacaagcaagacaggtggccatggagcctatgttttttgagcaatgcccttcatggaatcaataacaaatataaaggcttccaaagtaaaaatataggtgcctgttataaagagatgaattcaagtgagaattgtaacctaactcctctgactgaaatggcagttctctcaggtcaaacttttcccaatttcagtttatctgttgtccttgaatatacatttaaaaagaagaaacaaagaaaaagaaaaaaaaaacagccagcatgtatttcaacagtgcccttttcctcactgagtaaaattaagttgaatcctaagtgcacatgtggttatttattgcaggaagcatttgctagttttttttttcagactaccaagtgtgacatgctaagtaattgtctctgataatattggcataagtttttgcttgggatgattggtagcaatttaaagatagacacacaatgatgttttccaattagctgatgaagtcttttgggatggccaatcctaattcctctctgaagggtgactcagctttgcattattattttttgatgctttgtatacccactttctgtactgtattttctatgctagtgatcacaaagtactttcatgtacattactcagatgctcctgaaaagaacctcataggtgagcatagcagttatttcagagacgaggaaactcatcctgagagaggttacatcacttggccatggtagcacagctagggcatgattgatgagactagaagcctctgacttctggtccagggctgtggctctgtcaagacaagatctacctcctttggatttttcatttctattcctcttaaaaccttctagcttattttaaagtagcacactaaaccattaaaaataagcattatttgctgttcatttttgaagtatttttgacaccaacagtattaaaagcaaagtcccaagaattttttttgagcccagataacataatatgaagttttgcttaagtattttaatggctataggcaaaatcgacacatttttctacttctacaaaatcaagatgtctgttttgtttgttttgtttctctgaggacatgttaaaattctcaatcaagtccttctgttacaggattctatgccctcttgtcattttccttcatgtcgttcattgcagtttttaattacatatttatttgtataattatgtaaatgtctgtttaaacctcttcggtgtcaacgtttttgagatgaggattttatctcttttgttcatgtttattgccagctcctatggcaggaccaggcacgtgggaggaactcatttagtttctgttagctggctggcaggatggatggagggatagacagatggaaggaaaatcaccatgtgtttcatcgatttgcaagttctaggacagagtcttgaaaccctgaaaggtatcctagtgacttccttgctcagttctccaaaggtgagcaaatggctttttattgaagaaaaacattggcccttacctaattccaaaaggaaattatggctgcttatacatagaaaaacaatgttagatactcaatgccacatgattgaaatgaaatgaacattatcccaaggaagcagacagatgctgcattttaagacacctgcatttagcagattaaagcactcctctcatgcgtctgctcctgttcatttctgatgctgaaagagaagagagagaatgttgggagagggtgtttttacttcctgacagtataaagcatatgaattcagctgggttttccccaaatttatactttagaaaacattgttttacttatgcactctctcctactttttctcatttctctttttcttctttcatccttccttcctctttccttctttcttttttttttaattatactttaagttttagggtacatgtgcacaatgtgaaggttagttacatatgtgtacatgtgccatgttggtgtgctgcacccattaacttgtcatttatattaggtatatctcctaatgctatccctcccccctccccccaccccacaacaggccccggtgtgtgatgttccccttcctgtgtccaagtgttctcattgttcaattcccacctatgagtgagaacatgtggtgtttggttttctgtccttgcgatagtttgctgagaatgatggtttccagcttcatccatgtccctacaaaggacatgaactcatcattttttatggctgcatagtattccatggtgtatatgtgccacattttcttaatccagtctatcattgttggatatttggattggttccaagtctttgctattgtaaatagtgccgcaataaacatacatgtgcatgtgtctttatagcaacatgatttatattcctttgggtatatacccagtaatgggattgctggatcaaatggtatttctagttctagatccctgaggaatcgccacactgccttccacaatggttgaattagtttacagtcccaccaacagtgtaaaagtgttcctatttctccacatcctctccagcacctgttgtttcctgactttttaatgattgccattctaactggtgtgagatggtatctcattgtggttttgatttgcatttctctgatggccagtgatgatgagcattttttcatgtgtcttttggctgcataaatgttttgttttgagaagtgtctgttcatatcctttgcccactttttgatggggttgtttctctttttttctgccttaggtgtttatttacatgacacttttcagactttctcacattttagaagggaagagtatatgtgctctgaattccagagaacacatttttggttcatgatccattgacacaaaattagaccagattgtggaacactgcagattatcctaaattccctttacggatttatttttttttcttttcagtcaggtaggacttgatgacaacttgcttcttcatagcttacttaagtaatttcttaagtatctttccatctcccagatacaccttaacctatagtgaaggtaaagattcccataattgtcagaggtaactcccagattcttattgatcttcaagaaatcttcctgtgagatgccaagatttggctcttggaataattttatgggatacattgtccagcttgagaacttgtgctgctccttctgaagtggcatcaactgatactagtcactagaagaaaactatgtatgatgctgaaacccaagctcagaaagaaaaacatctggatgggtaaaagtgaattgctaagaagcagaaaaatctgaaccaccttattttggacatatactaataaaccctttttgttgaatctaagacaattttatggcaaaagtgttttttttggaatgtgctagtaaatgaattaccaataattaccaatacttttatgtctataccttttgaaaaatacacacacatacagacacatatattatatataatatacacatatgtatacacacacacatatatatatatatatacacacttttttttatatatacggtctcactctgtcacccaagctagagtgcagtggcttgaccacggctcactctagccttaaactcctgggctcaagcgatcctcctacttcagccttctgagtagcttggactacaggtgcctgccaccgtgcctagttaatttttttaattttttgtagagatgggctttcaccatgttgtctaggccggcctcaaactcctgagctcaagaaatttggccatctcagcctccctgataatatatttttttaatgaggatgtattcatctctttaagcattcatattaaaattgggttattcaaaaacattctgaggtttgtgaaataaaacatgatactatttgagatctgcttgataaaaggcctgtcattacatggccttggttgctattctagaccttctttattctctggaagcaaagcttaagagaaacacttaaggaaatacccactttcaaggaagagccaagagttggctgcatccaaggtcactaattgtttaaaattaatttatttcaatggacaaataaaaattgtgtatatttatagtgtacaaaattatgttttgaagtatgtatacattgtggaatgactaagctaattaatgtatacattctctcacatacgtgtaatctcttctggagacaacacttaaaatctactctcagcaattttcgggaaattaaaaacacaataagatatcatctcacacatgttgggatggctatcatcaaagagtcaaaagataacaagtgctggcaaggatgtggagaaaagaaaacccttgcacacttttggtgggaatgtaaattagcacagccattatgaaaaacagtatggaagttcctcaaaatattaaaagtggaactaccatatgatccagcaattccactgttggatatatatacaaaggaaaggaaatcaacgtgtcaaggagatatctgcgctcccatgtttattgcaacactaatcacaatagccaagatgtgagaacaaagtgtctaccaaaggatgaatggataaagaaaagggggtgcatattcacaggggataccattcaaccttaaacaataaggaaatggtgtcatttgccacaacatggattaacctagaggacaggaagtaaagaaaaccagacacagaaagacaaatactgcatgatctcacatatgtgtagaatcttaaaatgtcaaactcacagaagcagagagaaaaattgtgattactacgggctggggatttgggagttgaggagatgttggtcaaaagatacaaaatttcgggtaaataggaggaataagttcaaaagaacattgtacaacatgctgactacagttgataacaatggattgtatccatccatagtctttttctttttctttttttttttttttggaggcagggtctcgatctgttgctcaggttgaagtgtggtggcatgattttggttcattgcagcctccacctcccgggctcaagcattcctccttcctcagcctcccaagaagctaggactatacattcacagaaccacccctggctaatttttgtatgttttcagaaacagagtgtcactctgttgcccaggctgatcttgaactcctgggctcaagtgatctactcaccttggcctttcaaagtgttgggattacaggcaagagccacagtgccaggcctcatctatggtcatttttaaagtaaatttgggatcaacaaagactaaagctcattatgggtctgaatggagtggttctgattccaattttgcacagaaaacaaaatctaacaaatttcattatgttcataattagattatcttcacatagatggtattatcagtatagaaacatcttaaatggggggtttgagatggaattggacctttaatcagccttctgccaaattatctttttgcctttcccattttaattgcagtagagtttcctagaatttagtactgaaagtaaaaccttgttaatttagataaaactaattacgaatttgtggttttagccttgaaaatttaaattttatgcttattttaataagcaaataaataggatgaataacactgctattggaagtactgcctacttgggaaaacactgctttcacatattaaaataacaatttactagatatagtgtaatttcagcataagtggaagttggcatgactgaaattgtggctttgatgtgctagtttcaagccattcttctttatttattaaaatgggttctcaatggagcaacagatggttaatgtaattctaggatttggagtcttgaaagtaatataagccctcttcttttaaaatatccataatttatatacatcttcccttttagtttgtataaatgtttggttcaattagccaaaaaacaaaaactaaaaatgactgaagtattcttttttctcataaaaacagctgttgaaacagttgaaattatttttctgatcaccaacctgtaatacagtcttcgctttgctactagtcgctttttttcttctttttcttaaattatcaacaccaagcattattgtagatcaccttaagaagctcaataacttatcaagtcatatagtaaaacaattatgacaattatttgtagtggtctggtttgtatttaaagttcagtattttgtgatttttcgggtctgctattctgattgcattgctccactgccaatttactatatgttagctccatccgaataatgtgtgagattctgaggatgaatgcatgcagattatgccctgaccaaagggccacagtgaacatagccaagtggctgttggaaaccacctcaggctcctctagcagagcctgtgccttggaaattggggtgaggtggcatcaggccagaggaagaggaacctttttgcaacccatcagtcaagagaagtgcctttgtgtaattatctctccagagggtgtgctttaccttagaaatagcaggcatgagtttgacccatatattggtacttagggtattttttttcaggagtttttggttaatacttatatcatttttttcctaaaagtgattacaagttgatcttttttcttcttctgttattgcctatcattaacccacatggtctgtgcttaaggagatgggaaaaaggtgggacttcacactttgaacacatacaacacgctgggccaggcactgtattaaggtttatgagagtgaggcatctcgcctgaaagaagttaagacatttgccaaagtttgtactgccagtcagagacaggatcaggactgaagctcagatgcataacacaccaaaggctgggtacttcactagacacatgcttcacaaacaaaagaactcacagaggcagacccaaggacctctacggagccattgatgactcgaaggtcatcttctggagaaaagccatctaatctcactgcagtggttgttgtcttccttctaaccctcagaatcaaaacaattgaaaactttggtccatcacatccttaatgctattgtatgaaaattgctgttttaaataaccaaaatcattgtttccttagtgatatttcttctctgctactcttgagggaaagtgtggcacaacacacacatcaggcacctcagaaaatgagataaaatccattctggggaaacccagggatgagctttccaaagtccatgccagaaagccctgaaacctgaaggtaaaacctggcgtcacactcatttcccaaggtgggatcctgggcagatgtctcattgatttcttctgtctcagcccttccattgaccacgctttcccagccctggaagtgtcgtggcagggatggactgatgccaaacaacagaactcctgaagaagaaaggaaggggcccagcattacccacaatttagtttcagcggaaccagctctgtgccctcagatcttctagatgtgtgacatttgtcttttctctggaaaatgcctcttgagggctctatatccttcaaagtccatagtaacagggatctgtctggtttattctaatatttctgggcaaggaatctgaacacacagcctctagccccaccattcttctcagcctccagagatcctgttgttctaaaacccgaatttgattacctcagactttcgcttaaaacccttcatggcagccaagcgcagtggctcacgcctgtaatcccagcactttgggaggccgaggctggcggatcacctgaggtcaggagttcaagaccagcctgaccaacgtggagaaaccccatctctactaaaaagacaaaattagctgcacacagtggcgggcgcctgtaatcccagctaggagaattgcttgaacctgggaggtggaggttgctgtgagccaagattgcaccattgcactccagcctgggaaacaagagtgaaactccatctcaaaaaaaaaaattatagtaataatccttcctggccttcttcttgtctgcaagagaaactaattaacattttacctccctccctgcttgcttcccttccctaattttatattttattataataaataatttttttgagatagggtctcactatgttgtgcgggttggtctcgtactgctgagctcatgtgatcctcccaccttggccttctgaagtgctgggattacaggcgtgaaccactgcaacctgcttataaaaaaatatgcatgagctgcctctcacctgaaattccaggttcaggttgaaaccctgggcctacgttgctctgggcaaagaacttaacaacttgggcctcagttttctcatctgtaaaatggggaaaatgatgcctaaatcacagagctgcaatgagaattaaaggagtgaatatatatgaagcatttagtttagggcttgctgccttttgagtgttcagtcaatgccgcctgtgttagggttttcattttcttcttttactcctcaatggacacctgtcagatcaccagaggagcacttttcaatttctccaaagggctggactcaccttgacatgccctgctcctagatcacataatgaacccacttttgcttattcagctcttccttccggtcacgtgaagacacgcccaccaccaccttcatgtaaagctctcattcctagtccgagagctcccagggcaatgctgtccaatatctctatgttgccaaccacgtgtgtaatttctagcagcctgattaaaaacgtaaaaagaaatagatgaagttcatctcaatagcagactttaacccaatatgttaaaaaagttgccattcaacacatgatcaatatacaatttatttatgtgatattttattcttgttgtattgtgtgaaattgaggatatattttatactgtagagcacaaatgctctggagccacatatgactagcggctattgtattgagctgcatagcccaagagggtgagaaccacagcctgatcctccctccttcacagaaacccatcccggtggctgacacttaagagggactcgtaaatgcttgtttagtcagtaaagtgttgaacatgaacaaatcctgcgagtatgtaagtgtattagttttctggcgctgctgtaccgaagtaccattaaatgtgtggcttaaaaaacagaaatgaattagccagacgtggtggtgcatgcctgtggtcccagctgcttgagaaacaggtgggaagatcgcttgaaccgggaggcggaggttgcggtgagctgcgattgtgccactgcactccagcctgggcaacacagcaagactctatctcaaaatataaataaatgaaagataagaaaataaaaataaagaacagaaatgtattgtcttccagttctaaggaccagaaggctgagatcaaggtgctggcaaagttgattctttctgagtctgtgagggagaacttgttccctgcctgtgtcccagcttccggcgcatgctggccgcctttgattgcatttggcttctgccgcatcactccagtctctggtttcatcttcacatcatgttctcctctgtttgagtgtctgtgtctgcgtctgtctgtctgtctccaaattttcctgttttataaggacaccagtcatattgggttaggatttgatcttaactaattatatctgcaatgacactattcccaaataaggccgcattctgagatactgaggctgaggcttcatcatatgaatcccggtggctgggaacacaattcaccccatcacaacaaggcagatattaatgctgagtcttgcttcaggtctcacagcttagaggggcaccgcaggcttctctccaggttgtttgattcccaaatccccactcctcgactttggggagccctcagtgtctgggcttggtttctcctggccagtcagggttgtggttgggttatgaaggacagagcagaccatttctctgaagcctattattacttaattttcaaaaagtatttcgtgaaataaaattagcatggatctaaatacacccacattacaagaagatgaaattcccctgaacttgccctttgtcgtctttcatttctccatcatagctgcttccttttactgcattggtgtctgccaaccactggcttgggttgtctgctgaggaaaatgaggttgtgagggggaagcagtttgaggatgaaggaaataagacggtttcaagtcggcaggatggcccctttctctgtgtaatgacattagccaactcttttgaggtcaagtttcccagacggggccaactctggtctaagccaatgccacagtccctctcgtggtgtcccttgtttcctttgggaattggtgttttttaggcatctcagcgtgatgatccagctaaaatctccacatcacaaagaggagaaggctttgaaagccagaatctgggatttgccaataatgccaggactgtggtgcattgctgcgtttgcagacccaggtcatgtgtttacgtctccctctgcaacacactgaggaatcctattcctctgcctcactgtggaggagcatcttttgccagcatttaaaaagctacttcaatgccactttgtttaagataagcccataccagcattcaattggcccgcaaccaaagaacttctgtgcagctgggagaatttattactaaaaattattttccagaccgattatttaatttctttttctaaaggtcaaactttgttacattatgattaaagattcctctttttaaattgccttttttttttttttttgccaaaatgggctcctgtcagaggacgtggaaaactttttatttctccttttctctgaaaaaataatgagttctgcaattcctttcaacctaataattttggtagtgctaaaatttgtctctctgtttctaggcaaatccaactgacaccgtaatatatcgagtatccaatggagactatttcaggagttatttaagcatttaggacatgggatttggagtaatatgttccaggctttctttataaactcagaatatactagaaaaagaaatcaagaaaatacttctgtaggtccccctgttcttggagagaaaattagacacaagatggtgaataacaagtcatttcattcaggctcaacactatgtactagctggtccattaggctcccgcatgggtaggggctggggatgaggattaaagagagaagagagtttcgagggaatcaaaataataagagctaatagttttgagcatatatacaaggtagtgacaccctaaatacatcatctcatttaagatgacagaaccttatgacagtaggaattatcattcactcattatgggtaaagggttgatgttgcaaaagccttaggaagttgatggaagcccaccatgactcagaaacagagctaagtctgagctcagggcacttgatccgaaagcatgtgatgtgcttacatgtcccacagacatcccagagctgctcccaccctgattagcttttttcacatggcattttggacttctaggttgggcctcaaacttttccagcagattgaggttcagctcgaatttagaggacatagtgcctcctccctggccagctgttggtgagccagccacaaagaatgtttcacccccagcgcttgtgctgcaagatataccccagggtggctcattcccatcagagccccttcccaggaagtcaaaatgtgaaatttcccatggaccattccaacgattctttctgatgccttcctgggcacccagtgtcgaatcagaaaatacatttcagtccttcttttcctctgtgcacgtcacaatctaaatgctgagcctaagtcatgtaagatttgaatgagataaaaagagaagtgagcatttattgagtacttaccatgtatcacactttcagctttttactgtcattccctaattttatacttcacaaaaaccatatacagagagaactatcgttatccttattttatagttggagacaattaagtgtagagatgttaattcttttgctaaatgtcaccaccctattgaggctggctgaatccttagtttgacatcttttccagcctttcaggtgagtgaaggcccttggctggtggctggcgcaaggcacgcttagctcaggtaagtcataaaaatgtttctgcagtctctcttctaagccactgttgtcaggccagcacctttcttattggtaaaataagttacagttgggagcccgcttcaaggatttctttcctccaataaggaagagaagaactaacaagtcaggttatgactgggcattttaacgtattatttatttaaacagcaggtgttattaaaacatttttcagatatcaatattgagacccagagagattgacttctcctattttacacaaagctagactgagactcaagacactcctcccaattctttgcatggggggcaccttctatgataaaacaagagatgatctctaaattactgggagtgtgagtgtcttagacacattattctttttattttttcctaacatgttaatttcttatccagcgactttaagactggaaatacagaagccatcatgaatcaataactccagggttacagagataacatacaccctgtctagggacactcttcaaataattggaacatataaaaacaaaataaagtactgaaacgatactgagcatagtcaaatgagacaattggatctttgatggtttcccgagccctttcattattacaaatgtgttatttcatgcactaccatttaatcaaatgtaccattgactttaataaatggtataacactaattttcagaacatcagtaaaaatgtaggtcattgtattataattattgttcagattttaaaactcaggacccattacgtctgtttaatatcagtatttttgtgaaaatcatcctgagagtgcacttatgttcttttgtattatctttgctttattattttatctttggtttcccaactttgaaagaagatgttacaatttacaatcagattgttattccagggggagatataacaattctggttttattttttggcattctctcctgtaacttcatttcatcatctaagaaaacacatttataacagagagaaaaggaagtgttagtcctaatatatctcatgttgacagtgaccttctcatgctgttgtgattagggaatgattgttgcttccaaagttctcctcatttgctaatgaatatggaatgcttttcatatgtatatataataaatatatgaaaattatatatgaacattgtatatatgcaaattatgcataaaagcttcatttaaaacttctgttgctctctgatttttgaaaaaaaatagaaacacaatattggtttccctggtgaaaattctttccagaagacacaatatggtatgagatattcactaacagcaggcaatatacaaagccatttctactggaaaatataccatctggaaaaaaacaatttgtggaaatgcatgtcagtatgattatgttatcttaggttaatgatgatagtaattgcgtcaacaaagtagttttttagtagaaaatggaagaacatttggaaagagtcattatgaataggatttggttatattttctggctatgacttcatacatttcaaagcaagaggaactgaaccaagaccatgtgcctgtttccatgtgctggataaaatgctggaagagggatagggggagtcttgaggtttaataagactgaaaaaactctgtttcttagagttatccttaagtaaacctgtgatgagcttgactcaatgtccatgtcattctctgtgcttcagtgtcctggtcacctcctagttcctcatatactcacaccaatggccttcacacatgttgtcccctctgcctggagcagttccaacttcctggccccagttccccagtcttaaacccaacccctacgacataagcaatactgctttagcctctagaggagggatcaaaaagccctcactatacactactagcatgttgctgtgagcattttctatgcacttatcacagttataattgtgttcttattggcatgactttttgaataatggttgtccattccctgctagattttaagttccctaagtgtctaactcaatgcctgccacttagaagggacccataaatatgttctgaaagaatcaatgacttggctttatagtagtgatgactgtggccacagaccaccatcctgaagttcaccactagttttactaagcagcagtgagtggttcagctggtggttggcatgctttgctggctgccttcaagcatggctggggactgaggaatagcaatttcatctgtttgaaactatctgggctgtgtggagatcaaagtaggtgggggggaattagagcaactgattccttaatcaacccaatcagaaggacttcaaagaaacttctgtattggaaagattgggcaagagttccaaggaagatgaaggtctggatgtaggaaatgttaaatcttctattctgactttatgaagctctgtttctatcatattgcaaatgtttccagttcagttctaggcatgtgcccaaagagaacagtaatgactagaattataaattgaaagaactgggaaaagccttagaaaattgtttaatgcttttttccccaagatggagacctggagcagggcagtgacttgcccacagtcaccgagtgctggattccagacctgaccctgtccacacaccagtatcaggtctggaatccagccctctttctatcaaggtacttgcctgcttttcctacagcaagtctgctgcttatatacctggagcccctcactcatatgccttgctacctaggagcaggtgacctgggaaaaccacttaaccttcagggacctcaggcttttatttcccagatgtgaaagaacagggctgtgctagataatgtctaaaaatccctttgaattgtagattttttgttattatcaacaaaccctctgctcttctcatactgcacgatgccttggacatcatatctaaacccactcagtgtgatatgaaagttcagcattaataatcagtagcgtaaatatagcacttactatacgctagacacgcatagagcaactaatttaatcctcacagtgaccttatgggaaagactagtatttattcccatttcacagatgggaaaactgacctatagaaaacttaaaagtcatacacaaggtctcacagatcctacgcagtagggctcagacttgaatacatgcattctgtctccagagtccatacagacttaatttacagacaactgtctgtgcaaagtggactttgccttttatatttttgtttatatactactcattttccaaaaggattaggagtaatttactgatgtacacactataccacatacacaacttatgaataaataagggggaaggaaagtcgatggatggggtcaatatcaaaagtctttggaacactttcctagatgtggttcttggtgtcctagtagtgaatgtaaagaaaggaaaaaaaaagaaagaaagaataccacctggaaactttcatctatgtgagacaggaattggaaaaaatttttgaagaatctccacatattattctgataacaagcaaaatagtggaatgaagtccattatattaaaaaacaaaatgaaacagaacaaaacaaaagccatttggtcaagagagacattccctaaacccttaaaaatggagctcaattttattttcatccttaaaatattgtttcaggaatttcagaaaaaaggtattgtcttctacccactttcattttcttttatctttttttctcctatatttttctttttcgtcacatgaattcaggcaaactagggaaacctagccaattatgagatcagtcttcttttgtcctctgaatttctgaagctccagagtccactgtgactctctggacaagactggtacccacaatgtgagagccctatccatagcttcagacagacctaggcaccttcacatcctcctccaagatctgggcatcaattctggttcttacatcacccccatgcccacccctctttatccctaaggacagaatataccacaagccctttttcaaacctgcagcctaacagccctcgtggtcaagaagatggtttttactgtgcagtcatctactaagagctcatcttcatgtagtcttttccagcctctggctacagcaccctcccccacatttgctacagctattcatgtgttcattcatgcatttttcactacttcattaattcatcaaatatctggagactcacttctttatccaactctgtgacaggcactctatcatgagtaagaagttactcttcatttcttcatgggggaacgtaataaagggtcaagttaatcaaataatcttacaaaaacgtgtaaaaaatttttgatgagtgctagaacggaaatagccgagtttccagagacactctagactcttcataccattcctttcaacagattttacattcgtctctgtctttccaagcttcatttgtgaattttcactttccataaacccttcacaatgatttagaatgttcacacatctttaaatcaactgattatcttcccatatcctcagatctatgtggcccaccctttgggtatccagtatcttgtctcccatccaaatataactctggtagcctgaacccaacaaaatgactataacagtggttctcaaagtgtggtacctagatcagcagcagcatcaccatttggcaagttgttagaaacacagatttctgggcctctccttaaacctactgactcggaaaatgtggagatggggcagaccaatctgtgctataagaaggtgattttgacaaatgctaaaatttgaatgcttcatatagcacaggagctctagcatatagaatactcaagatgaattagtcttgagacgtagtgtcatattgacttcattaattctgaatgaactaccatgtaaatgacaatccctagtggtttagcatgaccagagttgtttttttttttttttggatgctcaattgaagatcttattctacataatggatttacatgtttcaagagtaaaggtttgttttaaataatactttttcctacgtcatccttacaaccccattcctacacccctcctgggtaatgtttagctcatttggaaagaaaaccaatgtcacatcgaatcaaggcatttaaatacaaataaaatttcatttcttaggagtatatacaattttaaaaagaataggaaaagatacaagcttacaagataggaaaattataaacaatcatataaatcataaacaatcatagaaaacaaacacctattctctggctggggtcagcttctgagctctgtgtggctgactgaggctgatgatgtccataggacatcagtactcaaaaatgaaactatctgatctgacagatttccagctcctcctcatgatggtcagataacaggccctgagaaatgaacagtctttctgacattttccaggaaaccgaaatcttggtttcaattaggaggaccaaacctcaactatattgggatggctaatggctgagccaatcttttaatgtttccttgttttcatttgcaaattaataaaatgcagtcgtaaaaatgagaaaatgatgggcactcacttcagagaaatgaaaaatgtcaagttgtgtttgttcccatggggtggtttttatggttagggagatggggatatggcaaagctagctaactcagttgtccaacctggcaggccttctaaattttgtcttcttttacttatttttttttatatgcatttttaattttattatccaatataaaggtctattttaacatgaaagcatagctatttaaattcatgtgtataagaaaactgttgcgtcttagttctgtcattaagttttatgttgtatcattatttatttattttatttactatttataggaactgtatacaggagataatgaggcttaagctttagggcccttccttgcacatggccattgggcaggcctaacaatgtgttcactgtgtcatgagtttttgtaaactttgcaaaaccatgaaatttctgtgttcctttaaattcaactgaccgcctaaaattgcacaggcttaagcttcacaaaccctggctctcctgttccccacctgcgtaaatactgtatagaactcagaaggtagataaagacataggtagatagacacactatttccaatctctcattattatgaaaaatgctgtgatgactttgtatattattttgatagggatgccataacaaagaactacaaattgggtggctcacacaacaggaattcatttacaattctgggggctagatgtcctaaatcaagatgctggaagggtttttttgggggggggcgttggcgggttgtgaaggtgaatccatgccttcctcctagcttctgctggtttgctggcaatccgtgttgttttttgacttgtggcaacattactccagtccttccatggcattccccctctgtgtgtgtctctttccaaatttcttctttatataataaggacacaggtcttattggattgggggctccttctatttcaatatgacttcatcttaactaattaaatctgcaacaaccctattccacataaggacacattctgaagtaccaggggttaagacttaaacatacatttggggaagacatggtgtaacccgtctcactaaatgggctggatactttccatttttccctctggatcaactctccagccttttctgtaatgaaggactgcacatacatgctcacttgtcatccacatcacctggcttcagtcactggggagcactggctggagattggagagtggtagaaggggatgtctcttccctgacttttttcctgaagagtcatcctgacccaaaagttaagaaacaatttcccccagctctttattttcatactactattttgtatatatcaatctcccttacattagatttcatttttgtgtaaattattaggtagtgatccatttaatttttttccatatggctaatagttgacccatcattatttatttatttatttttaattacattccttttattctgaatgtatttctgtgccctatgtattggtttcttcagtttcctctgggatatctttctcttctgattttgtttcttttcagtaaagatcatctccatgtggcagggggagttcctgtatgggttaatccaaccatgagctttgcaagtctggcagggcatcttgggtgctttgttcacctggatatgctcaatggccaaagggtctacatcgaaacccctaggttctgacttattttctgcatttttaagcatgtgcagcaaaaactcagcattctttttgggccactgaccatgtgtctagccccaatgtttggcttgggcacacttcccaactccaccattgtaacactggaatggtacagactgtttctgacatctttcagatacttgacggctttttatatatgcatacccttggtggcctgggcagtttcatgggtgttttcagagtgaacatgaagatttgaaccttctgatttgcatgattttgtggggttttcttggtcaagcgaatagtggaccatttttacagatcacttcaggccactcaggaaagagcccatcatcctttacacagttctcaccttctaatttgaagtgataccatatatacatgtaatgtgtgtgtgtataaatacacaatgtatatatatatgctatatcaacaaaaaagcttttttgatttgttttggttttatatttgtgtgttataaactaaattgtatcccaccttcaaaatttgtatgttgaagctctaactcccaaagttagggcctttgggagattattatgtttatatgagataatgagattagggacctcatgatgggattagtgcccttataagaggaggcaacagagagcttggtctctccctctctctgcaatgtcaggaccaagtaagaaggcagccacgagcaggccaggaagagattccttattaggaacaaaattggccagcaccatgacctcagacttcccaagaagcctccagaactatgagaaatacatttctattgtttaaaccattcaggctgtgatatttcgttatgacagctcaagctaagtagggcaaattttggtgcaagaagagggatgctgttgtaacaaacacctaaaaatatggaacaggctttagaactgggtaaagggtaaagtctgagagagttttgaggtgcctgtcagaaatatagatgttaatagtgattctagtgatggctcagaaagaaaagaggagaactggtgagaaagttttcatcttagagactatgtaagtaatcatgaaaagtatggtgatacaaatatggatgttaaaaggctgttctactgatgtctgatgggaatgaggaagagtttattgggcaatgtagaaaaggcaatctttgttatgaaatgacaaagaacttggctaagtggcatttatgtactggggttttgtggaattagaacttacaagcaataaaattgagtatttagctgagggtatttccaagcagagtgttgaaggagtggcttggttcctcctgactgcttatagtataatgcaaaaggagagaaataaattaaagaaggaattattaagcaaaaatggtccagaactggaagatgtggaaaattctcagcctgcccatattgcaaaaaatgagaaagctttttctgaagagcatacgaagggtgtggctgaataaccattcaagatgattagtgtgggtatgaaccatggatctaatcagccatatcagcggtggcttagaatagagattgcattttaccagcaggaacaccaccagctgccactaaagataacagaaaagggggtgaatgaaagaaggctgtcagacttcttggatttgacaagatgggatgatagagctatttggctatgaacatgtgctgttcttcaagaagacagaaaagtagaccaaaggaaattcagagaccatcacagccaccaccttggtttcaacaggctagaaatcttctgtccaaatttgtggaggcaggtctgcctggaagatccccggggacacaactccttcccagaagagatttgagagcatgactatgcccagaagagccttggatgcaagacccctacccagcaggccttggagatgtaaccttacagcttggcagagcctcgggggtggaattgttacccccacatgtccagaaggcagggcatcaagccaaagaaaattattttcaaacattaagatataatggagtttgccttgaaagttttggaccctgcttgggatcaattacccatttttttcttctcatctctcccttttggaataggaatatttatattctatgtctgcccattatcatattttggaagcatataacttgtgcttgtcttgtgtcacaggtttacagctggagagaaatttctcctcagagtgaattgtgtctcgagtacaacagactgggtggcttcaacagcagacatttactttttcacagtgctggaggctggaagtttgagatcaggacaccagcatggtcaggttctggtgaaggctcttttcctagcttgtggattattaccttctcactgtgtcctgatatggctgagagagaaagctctctggtgtctcttcttataagggcactaatctcataaggttgctgccctcatgatctcacctaagtccaattacctgccgaaagccccatcttcaaatgctgctacattaggtgttagggcttcaatatatgagttgtgggggtcacaaacattcaatatgcaagactttgtttttcttttgccatatctttgtatatatactatacttaataatttttaattttatactgagtataatgtgtttcttaaaatgtggtttcttaaccacatgtttctctgcatgtttcttaaaatgtgatttccagaatcctggtgtttcctgagaacatttttaggggatctgcaaggtcaaaactattttgataataatgctgaaagttttttatcttttattgtttttatgtttgtgctgatgttgcaaaagcaatggtgagtaaaattgcttatgtcttagcatgaatttaggaagtaccaccaaaaagtactagtagtcattgaagccttcacagccacaaactcacagtttcagaaacttcccagttttagttttccataagacatatatattacatatataacgtatatatatagtacatatgtctattttatatatatgtatatatataatatatatatgtaatttttttgagacagggcccttgctctgtcacctaggctggagtgcagtggcatgatcacagctcactgaagcctcaatctcctggttgcaaccaatcctcccacctcagcctcctaagtacttaggactaccagcatgcaccagaacacctggctagatgttcttaataaagcgaaaattatggttaatttttattaaattttgttctttgagtacatagctttacaatcctctgcataatgaaatgggaattacacataaggcacttctgctgaatatgaaaatataatggtcatctcaaagaaaatgaactcctttttaatggaatatcatttttaaactgaaataactgatggagaaactgcatatattagtccattttcacactgctataaagaactgagactgagtaacttaaaggaaagagattttattgactcagttcctcatggctcaggaagcctcaggaaacttacaatcatgatggaaggcgaagggaagcaggcaccttcttcaaaaagtggcaggaaagagagagaatgaggggggaactgctgaccactttaaaaccatcaaatattgtgagaaatcacttgctatcattagaacagcatgggggaaactgcccccatgattcagtcacctcccattaggtccctcctttgacacgtggagattataattcaagaggagatttggttaggcacgcagaaccaaacaatatcattctgccccggcacctcccaaatctcatgtccttttcacatttcaaaatgcgattatgccttcccaacattcccccaaagttttaacttattccagcattaactcaaaagtccaagtccaatgtttcatctgagacaaagcaagcctcttctacctacgaacctgaaaatgaaaaacaagctagttacttgcaagatacaatgggagacaggcattgggtgaattctctggttctaaatgggaaaaattggccaaaacaaaggggctgtaggccccatgcaagtctgaaacccagtggggcaatcattaaatcttaaagcgctgaaatgatttcctttggcttcatgtctcacacccagggcacgctgacatgagtgttgggctcccaaggccttaggcaactccacccctgtggctctgcagggtacagccaccagggctgctttcacaaactggcattgaatacctactgtttttccaaaagaatagtgcaaactgttagtggatctaccattatggggtctggagaatggtggcccttttctcacagctccactaggaagtactccagtgagaactctgtgtgggggcactaatcccacatttcccctttgcattgccctagtagaggttctccattagggctccacccctgcagcatacttctgcttggaccttcaggcatttccatacatcctctgatatctaggcagaggctcccaaatctaaattcttgccttctgttcacccacaggccccaaaccacatggaagccaccaaggcttataccatctgaagctatggcccaagctgtacattggccccttttagccatagctagagctggaatggtggggatacagggcaccatgtcctgaggctgcacagagcagtggggccctgggcccagcccaccaaaccattttctcctcctaggcctgcaggcctgtgatgggaggggctgccatgaagatccctgatgtgccctggagacattttccccattgtcttggctattaacacttacctccttgatacttatggaaatttctgcagccgtggcttaaatttatccccagaaaatgtttgtttttttcccttactacatggtcatgctacaaattttccaaaccttttcactctgcttcccttttaaacataagttccaatttcagaccatctcttagtgaatgtatgtgactatatgttttcagaaaaagccaggtcacatattgaatgctttgctgcttaaagatttcttctgccagataccctgtattagtctgttttcagactgttgataaatacatgcctgaggctgggaagaaaaagaggtttaatggatttagagttccacaaggctgaggaggcctcacaatcatggtggaaggcaaggaggagcaagtcacttcttacatggatggcagcagtcaaagagagagaggttgtgcagggaagctcctgtttttaaaaccatcccttctcatgagacttattcactatcatgagaacagcacgggaaagacctgccccatgattcaattgcctcccatcaggttccttccatgacatgtgggaactgtgggagttacaattcaagatgagatttgagtggggcacagcaaaaccatataccctaaatcatctcactcaagttcaatgttccacagatctttaaggaagggggaagatgcttccagtctctttgctaaagcatagcaagaatcacctttactccagttcccaattagttcctcatccatctgaaaacacctcagtctatgcttcactatccatatcactatcagcattttgatcaaaaccattcaacaagtctctagaaaactccaagctttcccacatcttcctgccttcttccaagccttccaacctgttccaacctctgcccattaccctgttccaaagttgctttcacatgttcaggcattttaatagcagtgacccaaactcccagtaccagttctctttattagtccatttttcatgctgtgataaaaaaatacttgagactggttaattaatgaataaaagaggtttaattgactcacagttctacatggctgaggaggcctcaggaaacttacaatcatggaagaaggtgaaggggaaagtgcctactgtcttcacagagcggcaggagagagagagagagaaagcaataggggaactaccaaacacttttaaaccatcagatctcatgagaactcactcagtatcatgagatcagcatggaggaacccactcccattgatccagtcacctcccactaggtccctccctcaatatgtggggattataattcaagatgagatttgggtagggacacagaaccaaaccatatcactaaggttattcatatttgggaattttgcagatattttctcaaaaatgaattaagtgagcctgtcatatcaaggaaggtaattgacaacacttgtcaataataaaattcaaactttcaagtcaaaatgacaagtatggaaaatcgttaccattctgagcttgacatcttcccaacacttactgacttttatgatgagttaagtggtatgttgacaatataatttcttaatatcacacaataaagtgtgtcaacatttaaaagatctacataactggtgaaccaaatgaacaattcatgatgctataaagtcaagtaagattcatttaaagggtaaggtagaccaacggattttttttgtactacagtaagagaagttcattgttatggatttatattccacacaccatcctctaggaaaatacttttcaagttttgtgatattaaagaagtttttccacaattatttgaataagcttatagtaaaatactattctaactacatatctgtgtgaggccaaattttcttcatacactttgacccaagcaatatatctcaagagaaacagatatggaatccaactttttttccattaagacaggcattgaaagatttaaagcatgtaaaacagtatgactcttctcactaaattttttggggggttgaaaaatacaattatacattattaacatttttctatttatactaaaaattaatgagtctattattaattttaaataaattgataaatatgtttaaatcacttgttttttatttctaatatggtaaatatcagtagatacagcccacagaaacaaaagtcctttggtatccttaataatgttcatgcatgacaaggtcctgaggccaaaaatttgacattggctggtgcagtggttaagagtgtagactccggggccagatggcttggatccaaattctgactacccccttctagttatatgacctcaaggaatttacctaactccactaggttatttaaaccctatgtgctttcagtttcctcatctgtcaaataaagataataggagcttttaacctatggattatattgaggattaaatataatacatgtaacatgcatagcattttgcctagcagatagtatgatctatatatgttactatcagattcatgacagtaaatatcattataattattcagatttgatttacattatgtattcttggatagatattttgtgaaatttatttagggaaggagcaaagtccatgccataaactacggggaattctgttcataatttcaggttaggcatgtgagttcctttagcctttgctgtttcccagctgggatgagttgctgcagaattccttagtatgcggtatttttcctccatctgccctccttggtgagtggccttgggattatttgatttacttggtgattcctcattcatacttactttccctgctcctcaaaaccttatgctataaaggttcaaacatcctcccactgccagcatgtgcgtccattcttgccatagccgaaaggaaagttttggacttgttgctttctttcaacaactgcgttcttctggctcttctgccaagagggtctttggccagccacacctcttactcctgtttggtcttccctgaatcagccagcctttctcttgataatgtgtttcagagagaccaattttatttagtttcatcaatgatggattttggatttcacactaacactcatcatctcatccttcttgccacttttgggacattttccagaggaaaatttaaggcaaacaaacaaacctttattccactgctaagactaggcatctgttttaatattagcaattctatgttaacacagctcatggcatatgttgttttcatgttctaaatatgtgttttgagctgatgaaaagacaactctaggagaagagtgatgtaaagattgtctcttattgtgaaattacgtttatggcttaatatttttattccaccaagctaaggataaagtagaacctaagttggtttcagcttatgtcactgttctctagtctagccacatatattctatggaaactaaaaagcaaagcaaacattttcctcccaaaatcttgtttttgggaacttctgctgagcctcattccaaggttactatccgtgtttgttccacactggatgtctcctttactttcccagaaatcacatcactcatctgacctcagctatgtctcttacagcaagatatgtagaaatgatgggaaagaaatgatttagagatatttacaaggggaaagaaaagttgcatgattttaaaatagtatttattcagaatagcttcactagattgtccacctttgctgctctctggtgtgccagccttagcaaacatggttttaatttcaaatactacctgttgttaaattattttccactaaaccaaaaaattacgtaatgaattccagattcagtgcagcttcaagaaacataacctattttagaaccctagaggataattaagtactagaaacacttcaaagcaaacccccaagaagaaacactcaaattcacatctcgatctctcttggctatttttctaaccatgagagaggccagccttactcaaccataggaacaggttaaaaaatggatagttaacataatataatactttttttttgctgtacttagagtggattttttcttttcttctacaactgtagagctggaacatgattaatttagatcattctatggtgaatgtaaaatgggtgccatgctgagtttcagtcatattgttcaatcactgtgctctttatgtggcaacaacacctggtccaggaccacagcactgacggggataggccaagtagggcttatgggctcctgtggacagccttgttcatgcttcttactctcaatgtttggcaggagctcaggggaggctggcaactgtggtaagtctggatttgattttttacatttggaatagatgtaattaggcacagatataagactgatgacaaactctattgctgtaggtaataaaataagcaatagtgccaacacttaggggagccagagaaaactagtttgattgggagagtaagatgttgagaggaaactgctagatttctataaggattcactcagagatagaacattctttatccctatttgaaaagtgacctacctttcttctcttaggggatgctgcagacctttgcatttttaaaaagcagaattggaaaatttgactttcgtcttcaaattcaaggtctgatagttgtatttttaagtgcctggccactgaatatattgaactcttgtgccaccaggaaggtgattacaggggttttaaaaaggcctccaaattcagtcttgagagaaaggagtgtggcatttggtgatgttaggtggaagaggaagctgagtttggggaaattcaatgagatctagatggcccactacataacctttcaatgcccttggctagaaaacaaaataatggctccatcaacttacataactgtgagtcttgggaccccataaactgggtttgaattccaacttcatcactaattaactaagggttgggtatatgagacctctctgtaacatcctcatagttttttttttttttttttttttttttaatgcagtttcctttgttcaaaaagcagggggagaaaagtgcttgttcttttttcctgtagtctgaagccttgatctgtcaagatgtttttgctactaaacgtcttcctcccttgggtatagaatactcctgaggcatgagggccttatcccatgacgcagcctttggtggtgtctaacatcaaccctccctgcactcatgcctaagctgtagcccaggtatatggtggcagcaggctttgtgcagtgttgagggaactgatggccaagaacctgtcctagagaggcaggaaggtgaggaggaggtagtaggtggatgaaccaagtctccaggccactggcacatgttctgttttttcaactgacttcatttgcaaaactaaaacgcaaagataaaatgtttaagaatttcaagatgacaactgcagagcattaactccaagcataatgtccccttctgagtatggggccctgtgtaactgcactggccacatgcccatgatactagccctgcttcaggtgtgtccttgacctcgtcggctcttccattatctcctcatgcagcacaagccactgcttgtgacttagagcagagttccaaatcttttaatttcatggattatttggcaatctggtgaatctttttggcctcttcccagaataagttttagtacatcattttgtatagtacatttaaactatgctcttctacatgattatggttttctgtacagattatcacacaacataaatggccaactatcagataagtctacactttagcaacatgctatattggtgactgaaatgtctacattacagtatacatacaactacatctgcattatagtataccctctctatttaatcttatgttgatcaatatttggataaaatttagtcagagaccattccacagtataacattgttattcaagttaaagaacaagaacctttacaatgaaaaccttttaaaatgaacatgactctgaagatttggaactgcaattgtcttagagaatacaaaagagaactgagttcaaattggataggttcccttagtttggctgaaatgatattgatggcagtggtggcccatctggagtggttgctgccatcactctggctgcagcagggaaggatggccaaagctgtacactccatcaacagagcaagtgggagccagggacaagtgggagccctgccccttccaagttggtgggacaggagctccctgggtgcaactgcagccacccaagtcgtggctgtggacacaggcttctcactccatgtagcaggcaggatctccacccttctgggtgcagctatagctgcccaagtcatggctgcagacctgggcttccctgtgctcttgggggtgccaggagtaggcaggagtcctgccctgctgggcacagctgcagccacccaagtggtggctgcagacctgggcctcctgctccacagagcagtcaggagccctgccctccctggggaagctataccacccaagccacagctacagacctgggcacctctgcactctgggggcccaggaaggacccactccctgccttcacaggcttggtggtgtctgttcccactacctggcctctccccatttctggcacccactctgatcttagaacaaggtttgggtcgagcccagatgctgttgcagcctggccagccatgtgcacactcagggcagtgctgacatgccagcccactgccacctcagccccctccagacttcaggtgctgccaagtacgggagggaagttgaaggggtgctgagggcagcttggctctggcctccaggtgccccttggcatgaaagcctgggcaccatgaacagcaatgggagggaggcagacagggcaaaatggggtgggtccctggtgaggccccactttcaggccagggaggaactgaaggctggggaccaggctgccagtccgtggaccagagtgggaacttgtggtgacttttctgggcctgatcatggctgcccatggaccaattggcatgcacttcctccaatctgaggcccataaaagtcctgggctcggccagagctgagcagatgggatgatcagctacagagaggagctacccactccagggcctcctctctgccgagagctgcagatgtcagaaatgaccagctgcagagagtagctactcactccagggcctcctctctgcaactctctgcagagacaatgggacagcctgcctgcagagagaatctacccactccaggggcctcctctctgctgagggctgaacacttgatgtgacaacttgcctacagagagaagctacccactcccggacctcctctgagctattgtgtcactcaataaagctcctctttgccttgctcaccttccacttgtctgcataccttgttcttcctggatgcaggacaagaactcaagacctgccaaatggctgggtgaaagagttgtaacacaaacagggctgaaacacgccccttgcttgccacattgcaggtgaagagaaggggagaagagctgtgtccctttggggagtgcagacctgggagcccccctaaaccagggctgtgactccctcttctggggccagcggttcctggagtctccaatattttgggtgcgaccacattccgcattggcatttgtggaagctgcttgcggtgcacctggtccagccgcagttttgcagagagccagtgcccatgcccccacctggagctgcccaccgcactgcattagccagcacacttgactttgtgcagtggccagaccccacagtcactctttcacacacccctcaccactccacacctggctcgcccttgtgaggcatgggatccaggctggtagtgtgagccaagtgcagccttgccaggctgagtgggtggaaccagctcagcgggcccaagcaaaactcaggtaaaagtgccaccagccatagaggtttcctgccagaaaagtgacaccccaaggatcctgcaacaatgtgattaaaaatgaagacaggttgggtgcggtggctcactcttataatcccagcactttgggaggccagaagtttgagaccagccaaggcaatatagcgaaaccttgtctctacaatttattttttttttaattagccaggcatggtggtatgtgcctttagtcccagttacttgggaggctaaggtgagaagattgcttgagcccagatggttgaggttgtagtgagccaatattgtgccactgtatttcagcctgggcaacagagcaagaccttgtctctaaaataagagaagtaggaggagacagaagaggagaaaatataaaagaaataaaaataaaagggagtaggggcaacacttcattttctaaaattcttagaactttttttttgttaatattgtaacatttattttaggttcaggggcacatgtacatgtatgttatataggtaaactcgtgactcaggggtttggtgtacagattattctgtcacctggatactaaggagattacttaacagttttttttttctgaaccctttcctcctcctatcctcctccctcaagtaggccccagtgtttgttgttcctctcttcctatccatgtgctctcattatttagttcccacttataagtgagaacatgcagtatttggttttctgttcctgctttagtttgctaaagataaaggcctccagttccatccatatattcctgaacaaaggacatgattttattctttttatggctgcttagtatttcatggtgtacatgtaccacattttctttatccactctaccattgatgggcatttacattgatttcatgtccctgctgtcatgaataatactgcagtgatcctagacgtgcatgtgtctttatggtagaacagtttatgttcctttgggtatattcccagtagtgagattgctgggccaaatagtagttccattcttagttctttgaggaatcaccacagtgcattccacagtggttgaactaatttacactcccaccagcagtgttaagcgttttcttttcttcataacctcaccagcatctgttatattttgacttttaaataatagccattctggctggtgtgagatagtatttcattgtggtttttatttgcatttcttaagtgattagtgatattgagcattttttatatgcttgttggacacatgtatgtcttcttttgaaaagtgttcatgtcctgtgcccacttttgaatggtgttgttttttgtttgtacatttgtttaagttccttgtagattctgaatattagacctttgtcagcagatgcagagtttcaaatactttctctcagtctgtaggttgccttttcactctgttaactgtttcttttcctgcgcagaagctctttagtttaggttccatttgtcaatttttgcttttgttgcaattgtttttggcatctcatcttcatcataaaatttttgccttttcctatgtccagaatggtgttgcctaggttgtcttccagggtttttgtagtgttgagctttatatttaagtctttactccatcttgagttgatttttatatgtggtataaggaaggggtccagtttcaatcttctccatatagctagccagttatcccagcaccatttattaaacagggactcttttccctacttcttgttttttgtcagttttctcaaatatcagatgattgtagacttatggccttatttctgggttccctattctgttccattggtctatgtgtctgtttctgtaccagtaccatgatgtgttgtttgttgtagccttgtactacagtttgaagtcaggcaatgtgattcctccagctttgttctttttgcttaggattgctttggctattctggctcttctatggttccatatgaattttagaatagttttttctagttctgtgaagaatgtcactggtagtttgataagaatatcattgaatgtgtaaattgctttgggcagtatggtcattttaatttcactgattcttcctatgtatgagcatggggtgttctttcatttgtttgtgtcatctctgatttctttgagcagtgttttttgtaattctcactgtagacatctttcacctccctggttagctgtattcctaggtatctaattctttttttgtggcaattgtgaatgggattgccttcctgatttgactcttggctcgggtgctgtttgtgtatgggaatactacttatttttgtacattgattttgtagtccaaaactttgtgaagctacttcagctcgaggagttttgaggcagatactaaggggttttctaaatatagaatcatgtcatctgtgaacatggatagtttgacttcgcttttcattttttctctcttgactgattgctctggccaagacttcgaatactatgttgaacagaagtggtgagagtggaaatccttgtctttttccagtgttccagttttctaggggaatgcctccagcttttgctcattgagtatgatgttggctgtgggtttgtcatatttggctgttacaattttgaagtatgttccttcagtgcctagtttttgagggtttttaacatgaaggatgttgaattttattcagtcttttctgcacctattgatacagtcatgtggttttttgtctttagttttgtttatgtgatgtattgcatttattgatttgcatatgttgaatcaatcttgcatcccagggacaaactctacttgattgtggtggattggatttttgatgtattgctggattcagtttgctagtattttttgaggatttttgcatctacataaattaaggatatttgcctgaagttttcattttttgtgtgtcttagccaagtactggtataaggatgatgcttataccagtaccttataccaagtactggtataaggatgatacctataagtactggtataaggataatatctcataaaatgagttggggatgagtctctcctcctcaattctttggaatagcttcagtaagaatagtaccagctcttcttggtgcatctggtagaattcaatcatgaatctgacctagaacagtatttcaaggatgaaaatggaatggaagcaattgctacattttagaaataaattaggagagagagagagagagaaattcagatagatatcaggggagagagagacagagaataatttcagatagaaattaggggagaggcagagagggaataattctatttccatttaaatgaatataattgtattcatggataaccaatggttgagaaccctcctgtagcaagtatgcaagaaatagttccacagccagccagcacggagagtctacccagcctcctttgacccctgcacagtggcatacttggctgatatatctggtcacagtagaatgggctgttatgtcattgacagctggagctgtaatttcaggtggtgatggaagtacccaaatttccccctgggaatgtggtactagacaactgggtgtaaaatgcactgagtaagatgagcatcatgaacacttctttgaagtatctgatgattgcagaagccccagcccagctcatttatgtgtgggccctgccagggagtcttgagctcattttgttgtcttttaataaggaccaggaaatgcaccaaagaaagaagattaaaaactcattttcaaatctttcttttgccatcctttggagaaaccccatcatttttcattcatatcacttatttcatctgaggatcatgaagtgtgacctcggatgttttccagatgactaatggaatgtgttttggagacaaataacttatttttgtttagtgcacatgtttagctctgttatttatattacagaaaacaaacaaatggcatctgagagcattctttctactgcatatcattttaagtaaaaaaataaagtagaaggtagacaataatatatggtcaaggtgaaaaataccaagcaatatcaaacattttaatttataattctctttctttggttatttttagttaagagcatgaatcatctagaccctttttgaagtccttcaactaattagctcatttctgattcaataataaaattatttttgtccccatcccaatcctacccaaatactttagtattgcttagttactcattgcatagctatggtacctaataaactttgcttcacacaatactaaagatttatatcccactaacttctaaaagggctcaagtcagctagaaacatatatgagtataaccaggccatagtaatttttctccctgcttatgacatgtcattctctttgtctctatgaatacaaatgatctcacttcctgcttgtgcagctgatgagaaggtaatgaaaaatgaaaggaaaatcacttcccagttcttcaaaccgacatcactaattccctgtctctttaagacttggcagtcacaatgtaagatgacttcccgaaagaggagaaatctcaatcgtgcatcaagttgactttccacactgtcatgatatgacatgatagtccttcaactatgataccctttgattttgccagctccttatttactcagtaattctgttacatattacgctagattgcctgaaagatcatttataggaaacacaatgacttcaaggtccaaagacaccatatattttaggtttcagatgctgaaaaaaaaatgaaaataatacatgtaaaaatggttctggccaacatatataggtgtttcctcaatggtttcccctcaatccttctagcccaagcattgtgaactccacttcttcctcctctcagtcatatttcagtgctcacattgcaaggaatccttcaaaactgagagcccgttgtaagggtaggaaacactagggaagtgaggtaagtagtgagaacacaatgagatgtgttttaatcctgggcctggctttcaggtaggttattagtggttatagccaactcatttatgtggtggtgacacaagaactgcaccatggaaaacttaaataatgcccacatgaatatctaactgttaaaggatccctgagaatgatttcatgggatagtaatttttaaagttcaggaatacattttattgttattcctcaaaataaactgaattgcttaggatatggttttttattaatatgattagtagtaattgtcaaaaatgctaagaaatggtctccaatgaatatgtatggaagatcaatattttcaccaccattacaacagcaacagcagcaatagtgatgatagttgccaccattaagtcattaagtacctactttttgttaggctctgaactgtatgcagctttctttctttctttcttcttcttccttttttttttttttttttttttgatggagtctcactctgtcaccaggctggagtgcagtagcacgatctcggctcactacaatctccgcctcccaggttcaagtgattcttctgcctcagcctcccaagtagctgggattacaggctcccaccaccacgcctaactaatttttgtggttttagtagagacagggttttaccatattggccaggctggtcttaaaatcctgacctcaggtgatccatgtgccttggcctcccaaagtgctgagattacaagtgttagccactgtgcccagccaacattctttcttctttatcctgttatgtaaacagtggaataaatcctcagataatctgaattcattgccagtgccacatagcttgttaatggccaagtgaggatttcaaccatacgactctggtcactagatggttttctgcacccttctctctctcatgactcctttttttcagtaagttgtcaaggtatttgtggagaacagtgtaactgtcaggcctctaagagactctgttaacaacaatagtagggtatacacacagagacacacacgcacatatacatacaccacaaacctcaaagagctttcatagcttgtcagggtttagggaaaatgtaaaattattcttttctctagaaaatatttggagcactaaccactcaaaatattaaagaaaatgaaatgaaaaaaatagcatgctccattaagagacagaaaaattgtgagaggctggttgagagaagcagagaggaagctttataataggttttcgagtactcaagaaagatcagttatttcccatttcatctgtgcaaaaaatagaggaggaacttggcttaaaatatagcataaaagcaataacaaaataactagcgatggaattaagactcagaggaggatattgatgatgcttatggagtaatcaactctcttagtcttaacaagacgtagagctcattgtgtcttggaaatggttctttagtacttgagaaatagtgcatcccagtggttaagagtcagggtttggtactctgaccaacctggtttctttcttggctttgccacattgagctgtatgaatctgagcaggttacttaaccatcttaaaccccatttttctcatttctataaaggagatacattatctacaataaaaggatagatcattcttttaacaattggttagcacaacgtaaatgcatgttgactgttactgctactgctgtaatgtttaggtatagtctggcttgaaaatatgactgtgggttccactgagttatcattccccttcagacaaagacttgtaatagacatttgtcatgttatagctacccagatttcacgtaccttttacatgcttcaggaatcacacgattgttataagccacagcaaggaagatattccttctcccaactttctggcaatgagaatggaaacacgtgaccttggctggctaattacttgagttttgaatatggaagagtgatgaagagagcagaggccactagagattgttttctgaagctgtggctgaatagtaaactctcagcatgtacctgaggtttgcagaatatgctgggagagtggagtatccagtggtgatgagacctatagtaccctcctaagaaatcccttctgtggtggagtcttagctattcctagtttcctttggctcttgccgccattctcaatcttggttatctagtaattctggtgattctatgatttcgtgatgtgtccatcagctatatccacaaaaattcttcaacacaatcctccctgctccctacaaaaaaaaaaaaagtcaatggcatttaacacattcaacataagcttttttttaaacttttatagatgcaggttgatagaagatcagcccttctaggctggactttgcagggtgtggctacaagctgtggttaggtccaggtctcctccacattttctttatgtttcttggactaccagttattggagggatgtctttctgatgatgaaaggtaacaatgcatgacagaaggcccaagcaagcaagcacatttgaagtctctgcttacatcacaccttcgaatgcctgattggactatgcaaattccatggttgagcccaaaatcgatggggtaaggaatatatgctgcctctagtggaaagaaatgtaacatcttagggagtggatattacaaagcctgaggctgtgaatacgaagaagggtgaagaactgaggaaggtaaagcaaatgaccatatatgtgttcttcaatatctttccaacaaaagtcttttccgcttaaatcagtgtttgtttctgcttcttgtaacaaagaaccttgatatatagtatggggactattaagggagtgaatggtctttccttatagggtttgggggaatctcacattgttatctgacctgtatggaaaagaaggcaatgaaaatctagtgctttccagagcattaaaggatgagcctgtagcagcctgtgatatacagttgcaacataatttgttaaattattgcctaattgtgacctggaatacacactgaaagccactaagtgactactgctataaagtattataaagaatatacattattcaaagaatgaataatgtattcattattagatgtggggtggtcacatctaagagcactggatagcgtgaaaaggaataatatgctgaaatcagtgtattcttgtatcaaagcacaaactgaaaactaagaactttctataactactaaaataacatctttaatacattttatacctaaagtgctgagatcgtaagctgagaaacaaatgcgtcgaggattatatgctttgccaaattacaacattggttaaatatatagtgtttccaaatctcttaggaaattgattaagaaagaatgggctctaagaattgccatagtagcatttggaaaaattggagctacccaagcttctaatgctgctgagcctaccttgctggctgaagtaagcttgtttttgtctaaagagtctgttccagcttggcttgaagtcattgtgtctcccttgtctattttgcaaaagaacctcaactttgttcattcccttcccttccaaccctcatttcctccagatacataggtgcacacacattgcagcatgcatgcctaagaggtctgaagaagtcagttcttcgttaatttgtatcagcaaaaacaatctgagcagtatgtgtaggaatggattccaaggatgctagaacaaatagggaagaatgtaaatatagatcagactaatttattttaaaatctggaagacatatgagattctggattcaatatgctacttagagcagtaggagtagttttaaaggtttgcttggtctactcgagaggcacaatctaagttaatttgagataccataaattctttcagataacaaagagaaaaatgctagggtggaattattgagtgtaatccattcattattcatctgtaatctataggaagacacagaagacatgacttttctaaaaccttaaagaagtcgttagtgaaaggaagattagtatttctttttttgtcaacaggaatttattttgtagataactatcactttgaatatattaattttatagttttttattttttattttactttaagttctgggatagatgtgcagaatgtgcagattagttacataggtacgtacacatgtgacatggtggtttgctgcccctatcaacctgtcatctaggttttaagtcctgcatgcattaggtattcatcctaatgctctttctccccttgctctccataccacgacaggccccactgtgtgttgtttccttccctgtatccatatgttctcatgaatattagtatttcttaaaatagtttagtggttctctctgggctgatgatgcatgtggacaacaaggtagttcaaatgggctatctaattttaatgacattaaactatgtaggatggcagacaccaataagtagcacgggatcactacaagcatggtggaaaaggtactcacatattgggaccaagggggtgaactaaatgtcctgactctgagtgagcttcaattatgactttttgatcacggactcctaggggctaaaacaaaggataacttactaaacagctatttcacattaaaaaaatataaatcaaaaatctgaggtctccttaagaaacatagtttcttatcaaattcaaatagatgtgtcttttcacatatccaaagccctaataaagtgaatgcctaggaactcaaaaagaagagactcacaatatcgtcacaggcatgtcatgtgaatcttcattcagcctttcttagaagaacttgcatccatttagcagggtaatgcttagaggtgtggaagttgtttaacccggtcatagagagacctagaacaaaccttcagtgatttgggatttaatgggttaagttataaataaaattttgaactgaggctctctcccaagaggtccacctctcagttcatgctacggttatttccctagctgatgaatgcagatatataaatcctcatcaaaaatgagaattttcacactcatttgctcatctgcagagtgagtagtatgtttgtaacctaagctctaatttcatgccaatatactaaatataagattattagtaggggaagcaatggagggcattcctaacttctcaggcaaacaaacaaaaaaacctatgtaaaacttatacccaaaacaagaaaacagagaacattcaacgctcaaattaattgtaagtagaaaaataaataccaaatcctggcaaggtgtctcctaccattcttgatacaagcttttgggtaatataaaaatagctctggaaaaattgcaagacacagagtatacaaaatttatgacaagcctaaaattgatcagaaaaaaaataccaaaaaagaaagtaggcacagatgtaaaaaacaccgaaataatgtattgttcagggcacagtttacaggaaaaacactaaaaattcatccagaacctaaaaagtgagccttagaaaaatattgtttgaagggaaaaatatttttagaaaaagtggagtagtgccttttagaaatcgagtagacaaggaaaaaataagcaagaagagggaattcattatcctgcaagattactaaatcaaataaagaggaacacaaaacaccttcttatatattttctctcatttatttatctcccattaccaaatcagtaaagaaaaccttcttttctatactggctgaagatatgctttgtgcctggaacctcataaacagcacttaactaccagctctgtccacagactgcagatacaaaaaacagtatccgtttattcatctatctataagtactttaaacaacttagaaaattaaaatctaaacagttcacgtcaggaaaattctctcaatgaaattaaaattaattgaactcaaaaaataaatttaaaaagacaaaatataccagtaatgaagattaaattagaagttgcctaaggaagataaaaacaatttgaaacaatatgaaaaacattgagtaaaagcaggaaaatataaaatataataaaaattatgtaaagaaagcagtaaaaagagtcagaaagaaagtggtttaaatgaaggacaagcaaagaaataacaacatacatataattggtgtgctgaaaaggactttttttttaaaaaaaaaaacaagaaaacagaaataatgtttaaaagtattatccattgttctactttcagtaatggatgagaaactccaattagacagacaaactctactgcagataaaaataaactctgaaaaaaaaaaaccacaaaaggcagttactggaaaacaatagatcgaagcagattctagtggagtccatgcttgtaagcaggagttgtatagtaagaaatctctatttttatccttttagcctgaagaaggtgcagttgtcagggcactgttggaaaaatgacaatctttctggttaattagaagatttaggatgagacaaccataaccattggagagggaggagtattcacagatgaggaagagtcagccaaggactatttggtttatgtctacctgcatctctgaatgactgatgaaacatgagtggttggagcatactcagaacagtttaactgtctttgctgaaatagctcagctggaggagcattagactgaagagagcttaattacaaaattcttattttaaaattttagctaactcccaggagtgcatttgtagttcaatccgaccaaattaagtgtctgttagaacaaacaacaatatccctaaaaaccagttatcagataaaaataaataaatccagaatctctatagcttaacattagaatgttgaggatataattcaaaattacctgacatacgaagaaccaggaaaatagaatccattctcaatagaaaaaagaaaatcaatgaaggccagacatgagatatagaataaatgttagaattaacgtttgagtatttcaaagaatcttgtataaatatccttgataatgtaaaggattatatgttttcaatgaatttaaaaatatgaaatctcagcagaaaaatggataaaagaaaactgcatcaaaacattagaactgaaataaacttaccagatagcagaatggggaagacagaggagagactcagtgaactttaaaataaataaaggaagcattcaatttgaaaataatgagaaatacattaaaaaataaatagaacattaaaaacttgttaaataatattaaaagatcaaacatacatgtaaccagagtcccttgtcgtgagaagaaaaactatcaggcagaaaaaaagtgtttgaaaataataacggctgaaatttctccaaatagggaaagacatatatttacagatttgagatactcaccgaacatcaagcgtgaaaaagatgaaaaaaaaatggttatgcctaggcacgttatagtcaacctgctgaaagccaacattaaaaaagaaactttgagaggagcaagaaaaagatgacaagttgcataaaagtgaatgataatttgattaagaggtgtattagtctgttctcaagctgctaataaagattacccaagactgggtaatttataaaggaaagaggtttaattgactcacagtttgcctcacaatcatagtggaagaaaaacgaggaggaaaagcatgtcttacatggcgacaggcaagagagcatgtgcaggggaactctcctttataaaaccatcatatcccatgagacttattcactatcatgagaacagcatgggaaagacccactcccatgatttaactactccccactgggtccctcctatgacacatgggaattatgggagctacaattcaagatgagatatgggtgggaacacagccaaaccatatcaagcagtgacattggaaatttttaaactcgaaggagagtggaacaacatttttttatgtgttgaaaggaaactataatttaataatactttctgggaatagaagacctgaatgtacataacaatagggtcatcttactaccaggaaaatttaacaaaatgttaaactccaagccatatcttagaaaaaatattaaagttggaagataaagaaaatgcctgcagacctctagggaaaagatcaaataacttacaaggggaaaagattattatcacctgtctcagaaacaacatacaaggcaaggcaataatggaggagcattttcaaaagcctaagaattgcatacccagtcaaaccattcttcaagtattattgctataaaaaaacttttagacattcaagagatcaaagatagacattcaagagatcaaataattttatactcattatcccatcttaaagaatctactataagatgaacttcaatcaattaagaaaaatgacagataatgagtaaagatttgttggaatgagaccaaaatgaaggtgcagtcaagggtgaaatgttatacaacacatgctataagttacatattgtatgttctgatagaattagggcaactaaaatttgggaggaaaagtctcagggcaaaaggaaattggagtgaagtcattgattgttatataggcaataggtgaaaattaaggataccattaaaaactgacaagatattaaaggttaaaaaaggaaacataaaataacaacatcagaaagataaatacaaaggttatcacctgcacaaaacacaaagcttcctaaatactaagggaaattttagaaatagaaaaacaaacaataaataatttacagagaaaagacaactcttccttactgtggaaaccaagcttaaacaaaccagtgcataccatcttaacctaatggtgaaaattaacattgccagcaatggaataatcaacagcgtgtgcatcctggtattacacactaagatgtcaatctaatttctattgtatttctgactacaatgcataacttgaatctaaccataaggaaccatcaaacaaacataaattgagggacagtacatgagataactgatctgtacttctcaaagttatcaatgtcataaaaaacaaataaaaaatcatgaaacactccacattaaaaatgattagagacaggatgactgaaaataaatacagtgaattatcttggattttttttttttttgcaacgaaggacatgttattgtagaattggcaacatatgaatgagttctgtggaattagataatacattatccatgttagtatcctgattttgctaattttcctacagataggtaaaaaaattctatatttggtcaggcctggtggctcatgcctgtaatcccagcactttgggaggccgaggcaggtggatcccttgaactcaggagttcaacaccagtcttggtaatatgacaaaaccctgtctctgcaaaaaatatgaaaattagccaggtacagtcaaatatgcctatagtcccaactacctggaagtctgaggcaggaggattgattaagcccaggaggttgaggtcacagtgagccgtgattgcatcagggcactccagcatgggtgacagagtgaaaccctgtctcaaaacaaaaacaaacaaacaaaaacaatggagagagaaaatatacgctatagtatagggataaagagacattaatgtatgcattattaaaaaaataacagtgagaagaacatgaagaagaaggagagaaggagaagggagaagggtaataaataaaggaaagaaaagagaagaagaaaattactgaatgaagggcatcggagggcttttgtactttattgcaactcttatgtaaatttaaaattctgtcaaacatagagaaaaaaacaaattacctcaagtaatattatttcagcttaattattcagtacatccaagaggtagattcttccctcaataagaaataatattggacatctaagcttgctttagtaaaataagtaacaacgagataactatttgtggagtgacttgtgttgtatgttgagaagaggccaaactggtcaagtttatgagaatatcttcacaaaattcaccaatggaaaatctcacatcagacctctagaccgggaagtcaagctacccagggacaggaagttactaacggttggtagtccatgcaggtcttgccaaactctaatgagaatgactcctttgtttcattaaaaagaatttgctatctctgaaaaaaggaatggaaaatatttaaaataaaaagtttttttttgtttttttttttttctttttttttttttctgtgagacagagtcttgctctgtcacccaggctagactgcagtggtgcgatctcggctcactgcaatctctgcctcccgggttcaagtgattctcctgcctcagcctcctgagtagttggaattacaggtgttcaccaccacgcctggctaatttttgtatttttagtagagacagggtttcaccatgttggtcaggctggtctcgaactcctgcccttgtgatccacccgcctcagcctcccaaagtcctgggattacaggtgtgagccatcgtgcccatcaagaagcattcttttctatgcaatttggtgatagattgtgaaagcatcagagtttggtttaaattaagtcatgtaaatctgtaagcatcctaaaataccagagaattgtcacattatgaagttgtcttttaggaatgacagtatgatggccctctgtgtctttttaactatctttttaaatttcaagttttattttagatacatggagtgcatgtgcaggtttgttacatgagtatattgcatgatgctaaggtctgggatacggatcccaacaggtcatgagcatagtacatactaggttgtttttcaacccacaactcctctccctcccacctccagtagtccacagtgtctactgttccgatgcgtgtgtccatgtgtgctcaatgtttagctctcccttatgtgtgagaacctgtggtatttggttttcttttcctgtgctaatttgcttaggattatggcctccagatgcattcatgttgttgcaaaggacatgactgtatagcataccattgtgtgtatgtaccacattttctttatctccagtgagataccatctcacatcagtcagaatggctattattaaaaagtcaaaaatcaatagattcttccaaggctgtggagaaaagggagcatttgtacactgttggtgggaatgtaaattagtccagccactttgagaagcagtttctcaaagaacttaaaagagagttaccatttgacctgacaatcttgttactggttgtatacccaaaggaaaataaatcattgtaccaaaaagacatatgtacacataagttcattgccctctcttttttttttttttttggagatggagtttctctctgtcacccaggctggagtgctgtggcgtgatcttggctcactgcaatctccacctcctggattcaagcaattctcctgcttcagcctcctgagtagctgggactaacagtacctgccaccccgcccagctaatttttttgtattttagtagagacagggtttcaccgtgttgcccaggcttgtctccaactcctgagctcaggcaatccgctgcctcggcctcccaaagtgctaggattacaggcgtgagccaccgcacctggcctctctttctactactacccagctaagcataaaatgacattcttaaaattaacaaacaaagccttcgacaagagtgtaggaaagctcccatccagaaattctagtaaagatattcagttcagatttcttactgagtccacatgtactttctttctactgtttttgttcatttgtttgtttgtttgtttttgagatgggtcttactccgttgctcaggctggagtgcagtggctattcacaagcactaatatggcacactacagccttggactcttagaatcaagcaatcaattctcctgtctctggaattctttacttgctcagttccttctaggtaaacctatctgaaaatgtaattcaaatcaatgccatgattatttatactgttgagtttttgttgcttttcaggaaggatccctgtttcatgactttatgcactcaactgacaaatcattggcacaagctttcaacagtactgaggttgggagataaaggttgggagctcacccacagagttggctgggttggcagcagtacctgaaatccagtatggggtaggtaggcacagttatgaaattgctatctagactcttatttgaaagactttagaaaatcatgcatatgaaagatgaagtgcttacatagtcattaaaattctttaaagattttgctgaaaagtattgctgaagactgatagaatgttcccattttgtacgtgatcaaatttttgtttgacatttcttatatacaaagtatttttaagcagatgacttttttaaaataaactttattttgtggaatagctttagatttacagaaaaattacaaatatggtacagagagctctcctatatttccagttgtattccaggactatttatagttcctctatatccagtttctcttattattaacatattaatttagtatggtacatttgtcacaattaatgaatccatactggcatactgttattaactgaagtccatgctttattcaaatttccttagtttttgcctaatgttcttctcttttttttttgttctgggatatcatccaggataccatattacatttagtcatcatgtctccttagatttctcttggtcgtgacagttactcagacttttcttgattttgataactgagtctgaggagtgttgatcatgtgttttgtaaaatctctactgtggtttgtctgatatttttctcatgattagactggagccatgaggttttggtagggagagcacacaagtaaagtgccatttcatcacgccacagcaagggtacattctatcgatgtgacttttcactcttgatgttgaccttgatcacctgctgaatgagtgtctgccaggtttctccactgtaaagttacccttttaacttctctctttccattctgtgctctccagaagaaagtcaccatacagagtggggagttactcctcttccttgagggcggagcatctacataattttatgaaattattttccatgggagatttgtctcttctccctcatttatttatttgtttatgcaacaacttatttatattagtaagaactcatggatatttattttatgctttgggttataacccagtgctagggagctgatattttaaaacattttaaatgatattctgtaatttttattttatttctattgtaacaatagagtaatatttcaaagttactctttgagctcaaaactagatttctaagccaatatgtgcatttcatattatcaaattgttagtagtgaaaagtgttgcttatatacaacccactttttccacgtctgcgtaatataatttgcatattttgtggtattgaagttatacaaagtttaaagtgtcaaacatgtatttagtgtttattttaagaagacatttatggacattagactattttgaaacaagggcattgcatttcaatttgtaaagtctttgtctttttttttttttctgtttaaccactactgtgtcattaagaatgagtgagagctaagctatgaggatgcaaagacctaagagtgatgatacaatgtacaatggactttaggcacttgggggaaagggtgggaggtgggtgaaggataaaagattgcaaattgggtacaatgtttactgctccggatgatgtgtgcaccataagctcacaaatcaccactaaagaacttactcatgtaaccaaacaccacctgttccccacaaacctatggaaataaataaaataaaataatgctttatgtaatgtcaagtcatctctgaagaaactaagttcagtaactatcaaatagatgttctgtattaaactttaaaagagaaataaacctcatccattattctctgggaccattgcactaaaaccagactatcgtcacctcaaaaaaagaattattcagctttttagaatgagcaaaatctctttcattttctacgggtatcaataattctaataattgattctaaactgcaggagaaaatgtgccatgccaagaaaggactgatgaggaagtctttgtcttgcaagccacttatcattctaaatggatctccttgtagtctgctcctataacacaccagcagtcttccagaattcccccatagtgtggatgagaaaaatcaatacatcatcatttatgaatcatatttattcatgtcttattagcatagtctagcaaggtagtggcttttaacccttttaatattatgagctattctgagactccgaggaagtctctatgaatagatagaatgtgcaaaacacaaaatggctacatagacccctcctagaatccatgggcaccacattaaaaatgaatagtctaagtcatttgccatacctaagcctggagccagggagatggagaaacttgggtttccttctcttaccctatgagaagtagacactaattccatcatgacctgtcaggctaagtgtttatcctcttattttccctccaaaaagccactagctctgagatggaaattacatgaagtcacagatggagaatatttgtaagctgaacacattgtcttgagtgtgctaagcactcaataaacttgtttgaataaaagaatggattaatagatgtatgtgtgcagtaggactcaacacaagctttcttgttagatttatattgaaaacaccaacaatacacagacacataatttttgcaacttttcatagaaaaactgaaactaacataggacagtggtaaaaaataaaaatcctacaatttctaagattttatagaatgaggcgataaagaagtataatttattcatttcacaatactgttcccctcttagtgtcggtcaactcaaccaaagcattaggatttgtgggtagcagaagaaagtcttagtaataccacaggaaaaaatgtcaaccggctttagttcagtaagcaagggatacaaacaggaataagtgttctcctataactcccctgcttactctaaatcacagtgtttatgcttttgtgattcataagacttgatttagaaactcatagtgtttaccactgttcaaagaaatcatcagagctgaagtagtttctattacttgtaaatcaaaaaattatatcaagtcacacatactttagtaagccaaatgtattttagtggcaggtacttgtagttaggcagatgccagcataaaatttctttgggttcaagaatatccaggccaaatgaagacaatagatatattctcatatttagctttcataaatatatcttattcttcttccctgaaaacatactacccatagtaattcctgaaaaaggctatcccaaaagatatacttattcccacatcattagaaaaatggaaaggaagttgtaacagagactggcagtgattgttaaaatcagcttcatatgtctttatacaattgtagcaattaaaattttgttaaagtgatcatttcaaaaacatacaaaaagaaaaaagcataatgaactcccatatacacaccactcagcttcaacagttgctaatccaggaccaagtttgtttcctctatatcccaaccctgtctctctaacagcctcctactccaccaatcactggattacttaaaagcaaattgaagaccatatactttcattaataattatttcaataggcatatctaaaaagataaggacttttaaggcaaacataaccacagtggaaaaatcacaccacgaaattagagtaatttcttaaacttatctaatatctaagcaatgtttacatttgagaataattatttatttttaatttttaaaattatgggattatataaacccaagtcagaagtaccaaaatcgttaaagttattttatttgggaatggatatcaaaatttattgttttattatctatctatgatattatgtatatagtatattttaaaacacttaatgtttttatttgataatggatgttaactcagttttgtaatatatattagatacatgtgatataatgttagttactttgagaaattttaatgggacctaccagttggagttacttttaattttatttttgcagaagataaatgcaaacaaaacatcactttattgcaaggatagaatgaaaaagaagcatgagaaaacaaaaggatcaatatggttacaagaaagagtggacattcctgtctgtttacttctcctttctgtgtgaagtaggagatgactttatctgctaagagtgaatggggatgtgagagcagaggacggacatttgaagaaagcagaggaggttgggatagtctttttttaaagttttttttttattatattttaagttctagcgtagatatctagtctaaaatgaactctcactagcagtctccagtgcaaattttcctcagaatccctgatgatatgtgaaaaataaaatagcaacttttaagcatctaatactgaaagttagaatctaaaaagaagtgatactcatttgaaggaagagtgtgagttaagaaaatctctgaaaaacctcatcttggggcacagtatgattccatgtcatgaaacaaatatgatattcttgatccaaaacttcaaatagattaacagatgaaggagagtaaaagtacactctcatataaagttcatctcatgtaagagaccaaaatgaacatttcattttagtctttggtatttacatacatataagttgaggagtactcctgaaaaacttacagggaactgttaaaattatcactggcataatcaccttcaaaaatactgcttaatttaagcaaaccaaccatcaccaccaccaacaacagattttacacattaaaagacaagggcaaaagatatcagtgaaaaattaaagaagaaaagaaaagctcagaaccaaatgattataatttaaaaagtaaattaattaaattccccaattaaaagtcaaagtctttcagatcaaagaatagcaattaagttctgggtacaaaagatcaactcataacagagattgaaaggttaaatgttaaaaatgaagaaagctatatcagcaaaatctaaaaagaaagtagagcactacagtattaatattaggaatgcaataaatataataaagatctacaggaagatttcgttaaactagtttttaaaaaggctctgataaaactaaacgattaaatttatgataaatatataatgactaagaaactatttaacaaaaaaactctcactaaaatgcatacataaaaatttgttcaaaattaagataaaatgaacagaaataccatagggatgaaagattttaccatatcatcctcagttattaaagatgaagtaaataaaacataaatgagattatataagatttgactaatacactttatcagattgatttatcagattcgtgccatagatatagagtcacatcacttcttttcaacatctacgctatatttacaaaatttagtgatatattaagctacaaataaaatcttaataagtcctaaatagctgaaattgtataaactccactttctaattgcaaaggccttagaaaggttacaaccagaaccacgacaaaaataaatacaatgatgtagagtgaaagcaactcaaattcagggtcaaagaaaaaaataaaaaactgtgatatttgatgtattatttcctactgtataacaaattgccctaaaatttcaagactaaaacaacaaacatttattatctctcagtttctgtggggcagaatttaggagcagcttagatgggtggttctacttcagggtttctcctgaagttgcagtcaagatgtcagctaaggccatgctcatctgaaggcttgactggaactggaactggaacttccacttccaagatggtgcacttgggatcaacagatagctcatgcaacagactgctgttggcaggacacctcagaatatagccatagggcctagtctagtacttctccataaggctgtatgaaacacggcagctggttttccctagaacaagtgatccatagagagaggaggaagcgtctatattttttatgacctaatctaagtatacatggtcactttcatcttattctattcatggtgggttgctgagaacagcccacacttaggaagtaaattaggtggccccttttgaagagagtgtcacaaaatttgtgaatgtattttatgctacattacaccgttttaaaaataaagattataatcttaatacttatcaatatttgtgaagtgtgactgtattagtccattttcacactgctgtaaagacactatgggagattgggtaatttataaataaaggaggcttaattgactcacagttctgcatggctggggagacctcaggaaacttataatcatggcagaaggggaagcaggcaccttcttcacaaggcagcaggagagagagcgaggaggggaaaccaccccttataaaaccatcagatcttgtgagaactcactcactttcatgagaacagcatgggggaaaccacccccatgatccaatcacctcccaccaggtccttcccctgacacgtggggattacaatttggtttacaatttgggatgagatttgagtggggacagtcaacccacatcagtgatggaagcttttattatttaaccagataaaataaagaagaattaaagggaaataaaattttaagttcaagaggctaagaaaagcagaaacagcacattcataaaaggaaaaaattgtttacaaagatcaagacagaaattaagtatgtaaataaataaaataaaataaatattgaactatatgaactaatttaaagtcccagtgctggccaggtgcagtggctcatgtctgtaatcccagcactttgggaggctaaggtgggcggatcacttgaggtcaggagttcgagaccaccctggccaatacagcaaaaccctgtctctgctaaaaatacaaaaatcagctgggcgtggtggcacatgcctgtaatcccagctactcaggaggctaaggcaggagaatctcttggacttgggaggaggaggttgcagtgagctgagatcacaccactgcactccagcttgggcgacagagcaagactccatctcaaaataaataaataaataataaaaaaataaggtcccagtgctctggaaggcccaagaaagtaggctaacttcagagaggaagaatgagtaaccataaaccacggcattagaaatgtgaaaaaagatacaaccacagatagagttatttttaattatgaaagaacagtatttaaaattatgctattgtaaaattgcttcagaagaaatttttaaaatctgaattgacctgtaactatgaaggaaactgaaaatcattataaaaaagtcttcttccctttccccaaattattctggatctggaaagtttaattttgcatttagatattcagtcagttgatcattctcatgctacttaaaatgatccagaacatttaaaaagttacaaattaatgttaagaagcaagtaaaactcaggtatccaaatgatgagagtagtagaaaattattcaatttttcaatgcctttttattataaatatatactcaatagtctgaaggataccagtagtgtattaatggaaagactatgaatttgtcagactatgaaaatcaagtcagcaattaccttcctataagaaatacactgaaaacaaaaagatactggagaattaaagtgaagggatggacaaccatgtaataggcaaatacaaacacaaccaaaaaaccaattgaagctaatagcatgaaaattgacaaaaagggttaattatgagggaaatatctaacaggaaatatgaggaatcgtgttttattgactaaaaaatctgctgaagataaaacagtcttgaagctttagaaacagaatatgatgacttcacaatgtatcgacttaggagaaaatgacaggtacaatatttgtaacgggtttgggaagcaattcagcaattacattttgggaatctttgaagtgctcttacttcctggttcacttattttccttctcagaaaagaaagtgtatcttaagaaaaacaatcctaagtgaggggataaagacttcatgtccagaggtagtaaagagtcataattgaaaacatagactcaagggccagatcgtctgggtcagaaactctggtttgctacagaagctgggtgtattctctgtgcctcagtttcttcattgtaaaatggaaataaaaaccctccacttcacagtccccccaccgcccactgtattacatgagttagtatatgtgaagtgcttaggatagtaaatctcatttactaactggtgtatatgcatgcctgtttttattaaatttatcagctctgtaagtgtcaatggaaaaatgatgaagaaagaagaagaaactatccagtataggaggggaattagacatatttatagaggagtgctatgcaaccattaaaaatgatggctaggaagacaacatggaaaaattaaaaatgctaataatatactgttaggtaaaaaaacaaaaatacaaatgatattgtatattacattactaccagcatatgcactagattttccatgcatatgagaaaatggaagttcacacaaatgttaatcatagagtattgcaaatggataatttttttctgtcattcacttttttattttctaaatttaccttttttggactaaaaaaccccaaacatctctgtttataaataagatgcccagaatggttgcttcacaatctttctccttaaagttgaaaaagaacatttcttaggcatttcattattctattacctttctttcggtgagatgatcacaatgattggaagataattcagaccaggattcagagctagtgaaatcattattgcacttcgttttgggtggttagactgatgctggagccccagctgcagaattgacttgtcatgacaatcatggtttcttgcaaatttgtatatgcttgccccatttattttctgttataccgttataattgaaggactcacacagattttcatgggctcgtttttgaattgtaatttattgctgattttactcctgtacatgtttgcttttactatgctgaggcaagggtttgaactggccacactggaagctgatggcattctctttatattctttcaccttcccttatatttatgctcaaccctatcaacttcagacataaaaacatccacactttgcatgtttctgagacacaggttctgttgcagtcctgcactggaaagtgacattgatgtaatgcatatctattcaacgttggccatctctgtcgggggagagccaccacaggggcagaccagctttacatgagcatttcatatgcctcttttgatggctctgctgagtggtattggtcaaatttagaaacagggatagctctatgtcatttgtcaattgacttcaggtggattgtcactctctcctatgcaggctggtgcaaacagaggacttttcgtaatcagcaggcagagctccagcagacttcagcatgtctgtttgagccgaacacttgaaaacagaagaaaattggtttggaggatagtaaggacagttgactttgcatgaaatgaggttttgtacatttcttgaggtgtgcttcaattcaggcacagcaattccagagatgtggctcatctccccttctatcgatcacaggcaattctgagtgtcttataactcttctttaaaaactggctgtgaatttaaacagctgctgcacaaggagaagggtgacagagtcaatttggcttcctgggaagagtgttaccactgtttcatggagaagattagagaagcatttctaatctaattgtcttccagtaatagagtcactttaagacagtctcttctaatggaatttgctcctggctttttaaatggtgctttctgaaaaatctagacaggctggcttactcctagtgctgtgtggtctaaagagcgaggctgttccaggagtccacttcccagtaccaatacctgatgttggttaccctaattggacctctgggagtggtccagatttcccccagaaagttttaggatgggtattgggttttagaacagtgtattgttcaaatcaaaacccatggtcatttgttgctcaaggctaaaatttcacatcctattatatttctgatcccaaattatgtccagccacctacaagtaagcctagagattagagattgttgaagagctcataagtatttttcgatattaaaatgtcaatattagatgccccaaacttgaatataaatcctctttcattattaatttttatgaaaaccttaagtcaccttgcagtaaagttattaatgagaataataattgaagttcaaaacaatggtagaaagagaacatcttgggttttagcttctccatagtggttttcagtcttagtgaccagccagagtacatgatctgtgaacttaaaataaattaagagaagcttctcagcagacatacctaagtactctgagacactaagtacttactaattagatacttaagtactcggagatatgtaagtaacctaagtactgtgcacttaccttacccaggaggaaatctgtctacaaacccattcaaagggcaatattaaaaactgctaccttcttgcaaagaccagaaatttgcaatggtataagctccaatcacaagatttaatttgcatttattttctttattgatttaatccaaaacctcttaattcttatttctctggtaagcctcatgcccctggctcccaaggaccagatggagtatgggctctatccagggcctaacgtctgtatacccttgtgagggggtgtatttgtctgccagggccactgtaacaaagcactacaaactgggtgcttactcaacaaaaatgcattgtctcaaagttctgagggctagaagtcctatatcaaaggacttggcagtcctggttggcagcgctggttccttcttaggtctgtgagggaaggatctgttccaggctcttccttggcttataggtggccattttcacgttcatggccatctccctgtgtgcgtgtgtgtgtgtgtgtgtgtgtgtgtgtgtgtgtgtgtgtgtgtctgtctgtctcaaaattcctccctttttattaggatgccatcatggtggattagagacaccccccgcaatgatctaattttaccttaattaccaccataaggaccttatattcaaataaggtcacattctgaggtacttggcattagcacttcaacatacacattcaggagggagaataaaattccacctgtatcagtgggcactttcatcctaggcttctctcactatgttgtacgaaaccacctctgagggaaggctcgtctcaccctgcaatgtgtttcagctggggaaaggctgcctcctgatccctgaactcaaattgctcttgatgcttctgaagcttcaagctgggcagcacgtgtgccctgagacccagcttctgttcagtatgtcacacacatgtgcagaagacagacatgcctttctggtttgattttcttctgctctttccatgcttccctcagaaagattcagacaaaatgataaaggtttaacctgcctgctaaggtggatggccttctcccttctctaacacaggtgctgtcttctggaataagtacctttttttccttgtatatttctttgatttgaagtatttcccaactccccaatctgtgaagccacatggcagaaagattgattctgccataattccctccttggctctagaaacagaatggaatttggggcaactgatacagcttcctaggcccagagctagaagttggagcttgattctcactaatgaatgcatcatagggcatgaaaaactagctggccttgccttctaaaaaatggcatatacttttctattcactaaggcctgaaaggcccatatgtagaaaggtacacttttttttttggtctataacagatcgttgtctcagctataccaccttaagaaaagcttaagaaaaggactatatatctttataagtcaagttatagccctattccttcctagcgagcatctgatctggtccctgaggcctgtgcctctgctgaagagttcaaatttgcttcaagcaagtaaggcctgcaagctacttacttcaggcctaacatccacagccctgactctattaagacggcaatttgcctgtggacatggccatcatctagctgcagtgagctgccaagcctagagtcctgactaatacacaactcaacttacacctacccaccaagtatcaagagtcaaaggcctattgcaaactcaggtttcatccaacctcatggcccaatataagtctgaaatcgcaaagtctagacatccacttgaacattgcacactgaagttcaagatccaaagctatgtgcctcaaactcacctacattttggtccacagattccagtctttctttctcaaggtctctggcactgcataataaatatggagtttgagagaggcccaataggcaataatctcctcacctgagttttgaactaagtgaaaagtaaggcagatgggaaacgaaaatgctattttaattttcaataatgctgattttgaggaatgcagcatatacctgggggcaagtgagctttgtcaaactgaaccccaacctcagctggacctactggtcacaggaaggctggaccatcataggtagccccacgcaggccactgtaaaacttagaacaaggcggaacagaccagaactcatgcttctgggcacagctggctctggaaaacaaagggagaggaagagccatgtttacaaatgcccagtccctctcttcacctcatcagtaagagctttcctcccctggggaaggagcaaggtggaaatgttataataacaaagcccctccacgtggaagaacccagcagacatagggaggaggtccctgccaaccacttcacaattaccccttaacagcagcaaaactaatacattaaataaaaaacattttaataataagataaaaataaataaaggagagaaaaaatatttttgctctgcacgtcacactaacccactttaccctccacttctgtgctgtttcctcttttttagaatctcagggctcttgatctctgtcttgagtgtacagagccctcgagtgtggcaccccatagggctcaattatccctgggaaatgccaccatattccttgatctcccatcaaaatgcacctgtcaagtgcatcagatgcttctccatctgaactgtaccttgttggcgtgatgggaatatgtagagccacgctgcaaatgtggcttctctttaaggggcaatgattttttagtagacaatctgggagaaaaaaatagcaaaagcaacagtgatatggtttggctgtatccccacccaagtctcaccttgaattttaataaatccccatgtgtcaagggcaggaccaggtggagataattgaatcaaggcggtggtttccctcatacttttctcgtggtagtgagtaagtctcacaagttccgatggttttataaagaggagttcccttgcacaagctctcttgcctgccaccatgtaaaacatctcttcgttcttccttcatcttccaacatgattgtgcggtctccccagccatgtggaactgtgagtcaattaaacctctttcctttataaattacccagtcttgggtatgtctttgttagcaatgtgagaacagactaatgcaaacagcaaaaccacattatcttgatcataataaaattcattcctattttgaggtacaaggcaaaatttacataaatttttaagtaaaatatgaggttttaagggaaattatcctgccactggctgctttgatttattctcccagtgcctttgggggcacactattcgctctttatttggatgggaaagcagctgtagcttagttcaatattaggaaaaagcaccaaaatagtggtaaaaataaaacgttttgagtcaggtaaattttgtgggcaaagtgtactttctttctaggtaatataagtaaagtaaatgaactgaagctcagctctctgattttaaaattgaagcaaaattaaagtttcctgcctcagaaggttgttgtcatgtgtgattgagataatatctatgtaagtcatcagtgcagtaatgggtacagggtatgggctgctcctgggatggttctgtcttcatttatttgtgtagccatttgtttatctattctcctgaccattagttcacttgttcactcatttaatgactattatgtaatttttatctaaatatataattatatatcatataataattttatataataaaattaatgtactgcaacctagaaataacaccctcagaagcacggtctgctctgtgctccacatgcatgagcttatttaatacagcaacccttggggccagtagtagccttactgctttttttttttttttttttttttttagaaaaggtaaatgagacataggttcaggtaatgcaatgaatcatataattgaaaacacaggccctttatttttaaccagagttcctcacagatttaatgcaagttagatgcttcaagcctcagaggagttcacacaaattggaaaatgtagaaatcgctgtaatgatgggatggtttctgcagagtgtcagcccacaagtacagtgggctcagtaactgaggacaaggcaaagccaaaggcagggtgtcatcaatctggaagtcatcggtggagaggtgaggtgtgcacaacccaacacagtctctggaggtggcagctatgaaagcatccggatcctaaggtctcaggagcgcttgtttgttgcttttgcaaaggtgcattaaatagggtaatcaggtgactaaagactctgtgacccgtgaacaactcctgcagaaggaagtgggagagggatctgtgggcatcagcagggctgaagcatggctctggcacacgctggtgggcacctgatgtccttccctgtgtgtctacctgactgttacagatccagccaaggtcgcctcaatgtattctgagtaagttatcctgtagtttaattcttcctttagcgtgctgcactaaaaaaaaagacttagggtacattgtagcctacatgcacttagaaaaattgcctggtccagtttccataatctacactagaagagactgaatcaggttggatctgacctaccttataatggtgtcagcaagtaaatgagatttgggaaaccctagtcagatcccattccctgcaagaattttggcttctgtaacctctcctgccatgtttctaaatcagatagtctttatctaatggcacagttgagttgtttggtaaaaggaaaacagagtccgtaacttggataacaagcactgggaggaggaagcccttggctctccagaggtgaactccttgcttgagtagtgacaaggcttcatggatgggcactgaggaagtgtggtgggcaggcctctaagacacgtgattgaagtttatttcaatagcagaattgagatgagaaaaatggattgggagaaatccataaggagtgacttcacactggtccaagatgatgactgatggctcccgaagtgtgtggcaggtgtggtggacgctcctggagaggtggaccatgctggcaggacatatgatttgggtcctgctggtggcctttgttgagccttgctgagtgccagccacggtctgctctatccttcgtgtgcatggactcatttaacacacacagcaacccatggggtagatatgagcctttggcattttattctttttagaaaaggtaaatgagacataggttcgggtaatgccattaataaagtcagagtttcaacccggatctgaggaagcctagagtgaacacacccagtcattcccttatgcgcttgtaaatactgtaggaaggcaactgggaaacacgtgtgtggaagaattggaaaagccttgccactgagcacagaaagagtccagtgttttgatggcatctcggaaagcaaatctgcataatggtgaggagtggaagggattccagctctgaaaatgacgagttgcatgagagctttgcagttcagcaaatctctgtgcgtcaggtaacaatagagataatgatagtatttacttcatattttaaggactaattgatacattaaatgcgtaggttcatgcctgcactacagtgagcctttttcgtatcacaacagagcttaaagagtgaagatgaattttcaatggtttaaagtaaatgttatttccccatattactagtcaatatttaatccatatttattagttaatatttctttttgattgcaagtgataaatcaaaactcaaactagcttaagtaaaataaaaaaaggtcacaggcttcaggcaaggtccgattcagagggtcaaatcatgccaccaattgttctttttcctgctctcttttgggtttttctgtttgattggctttaatctcaggcaggctttctacacagggtcccagattaaaataagcagatctttcccgattgatctaacaaaagtcctaccaggggaacatactaattgcttgacttgggtcatggaactacccctctgatgaggacgactgatcataggatcattgatttgacagccccaccatgagaatgggtaaaaggaaagttcccacgtaaaaagattccgggcagacaaaaactaacaaatacaactgaaccctatagttggcagtagatgaggaataaaagccttgtaacacctgatttttcccttctacaatgtagtattgaatatgtgataaatgatgtatatgaatatgtttcaaatgtattcggaaaggttttgagaaagagcatcttcctgcaggagcccacattatttgcctcatatcatttgcctcatatcagccagtagccaaaaagtctttatcaagtgattcccataacctaagactcctgtttgcacacagcacaaatcaaatcaaagcacagtcaacactacgataatgaaaatctttcctggcaagcaaggcccaggccccagctgcaagcacgtttgttccagtgacattcagaaccaccccttcagagcggtctaagagtatgcatcgcctttgcaatttgcatagggcatggcatctacatggggcagatacttcgggtgctttcatttttgtttgctttagtgcccttctttaggagatttcattctttattagcactctctaagagaaaaaaggaatgcagatctctgattaatctgcatggttaccactggtttgtcagagaagtataaagctacaggatgaattagggactttcataaggtcatcatcagagagataaaacataaaacctagcacgatgaggaaaatctccttttcctacagaaaatcatatttagtatattttagactataagtaactgccagacatcaagctctgcttggcttcaaatcttacaccaggaggcttcatctggaggaggctttgtctggagcagtgggcagtctggagagctagacttcactgtagctcttggaagcacttaaaaggttttgaaaaagtgataaaataagattcgtggtttagaagaaacattctggcaggtggaatgaagtagaagaagacaagagcttttactgtccagagtacaagccacggtgctatttacttaatgcagaactctcggctcccgtattatcctcagtgatggtggcagtgagaatagaaaaggtaaagtgatggtaagcatcctgaaggtagatgaggctcagagtagattgcttatgtctggaggacagtggtggagagagagaacaggggagagcatagatggaggtctatattggagaagggagctgtcaagatgccacacattgtcgcaattggctggtggacgagtcctgctatccccctccccatgccccgggaccattgcatttgtttttgcacttgagtgtgtccggtgtgagaatttgcagcagatgagaccatgatgccaggctgaggcgaccttgtggaagaggagatagaaagtagagtgttttgtgtttcaccgtagagaccgcctggtctcttgattatccagccactaaatcccatgccttttttaaaaaacaaatattttgagaggttttctttactgcattataataatagattgtgtaacccacctacacacaaacataatttcaaactgtactttgaagtagatgtctttgtaaattaactgacagtattatgcattacaacatgtagccacttgtaaatgactatactagaagataaaaacaacaagaataaccaaacactgctatagcttcccataatactccatagggtcctgtattactcccattgccagtcactgggccagtctccatttctcgttttagaggttgattacctgccccagggcccacaaggaggtagatgcaccaggaaacagagccagagatcaactctgccagctcagtaactggcccatcctcagcctccttttctctgaaacaaactcttgccatggaacatccggatgcaaactttgaccatgttgaacagtccggagagcagggttaaatagcatggctgtcagagcatctctttctgtccaatagggtggggcaaagagctcaaaaaaggaggcaagaagtcagcaaagctattatcaggcatgtccaatgaccttaatagttcatttttttatggtttgttcatttattcattcatcctggactttcaagactatccatgctgtcatggagtctgtatctcagtagagcatctgataagtcaggtacggatgagtgcattgaagtaaataagggaggatcttgggatctgggaagtgactgcgcagtggggatacttggataggataatcaggaaagagctctctgtatgggggggcatttagctgaatcctaaatgatgtaatgggcccagccaagctaagattccaggcaggggggctaacaacttgtgaaggcactgaagtagacagaacttgtcacttataaatgcaagtgccagagtaaaggaggcgagtaccattatctgttgtttgtcctgccagcatttctctctccttattctcattataaaacatcatttctccatgggggagtgggggaaaatatccctttatctgttccatgtggtccacggggactttgaatcccagaatgatctccctgacctgcctctcctccaaagttgaacataagacccaagctttgatatgtacatcattttcccccagactttctggaactaagactttctgagctgccctggagcctgtcctccccggacctaattgttcaactttctatttgattaagtgagtacccccaaactatcttcataatttatttttgtgctttcattagccagaatgggcttttgtgtttggcaactgattgcttaaaaaaattgcctgctgtaatcagctcatctttcatagagattcctatagatattgagatttaacttcatccattaataaatagaagagattggttgcatatcatattggagagatgttgattcagtgcaataagtattatgaaaatcatcaccatcatcatcaaataacaatttgaatataataaccaatttcttggatgtgctaccacatggccataatatgggcgctttgtaaatattgttcctgccagcttgctttatatcagatggcaaggatctttttaagacttgctgtttgtgcactagatttattttccgtgagaatgcaaaccaaataattaaaagaaaatggacttgactaagtgtataataggccaaatttatcctaggaggcccatcgtattcaagaaacaatttgtctttcagttagcaaataaataagtaaatacattttgcaatcacacaacaaaatgtcaagtgaatcctttttggtagcggtcagatgtccagtggagatgtgtttagcgtctgggtgtggagctggctgatgtcctttgcagtcccagggcgtgcctagagaaatttcagggagaatcactggataagcaccaagatatttttaaaaaagcaaacttctaaattattatttaaactgatattttaaactatggcatatgctttgggaagtgctaattttgtacctataatcatctctttaattttgtcttctttatgctttcctaacttaaagctttcctcttttctacttccctgtagtcttttcaacactaagaatttcacttttaatttattttcttaattttcttttgagttgctggctcccgggtttaaggtttctctcgggtaatctattatcagtaatagataaatgcatgttgttaatgtcaggacacttgacttccagttttgtctaatttatgaatctccaatagcacaaacatttctctggctaatttttaaaattgttttaaatctgtacctgaaaataaatgtattttctcttaaatatgtgttattactttatatttaattttatgcctcaaccagccagctttcttctgtttttctggtaagatttctcttttctctaaactttgcctttgtttctatctatatctttttgttattattcgctattaaaaattccttttttttttttttggccaataaggcaaagggagctggctattttgaaagttcttctctttatgacacaaagtcttaatggcagtagagccagacggtccattagagaggtattttgctgctgttatcaccaagagtaatactgtttaggtttccaagctcaatgattatagtttagacatgtgtcatgctaaaagtaatttaaagcacttccatatattttaatatttcatattgcagtgcagttttgggtaagaatggaagtgttgaacagtgttagacagatttgtgttcaaatcttggcttaaccactcatttagctttgtgtggttgagcaagatcggtaacttacttttctgcatcctgatactttcatgaggagtagttgaatgagacataatgtcaatgaaatacacataatatgtgctctaaaaatcatcattactattatattttatttttagtgccaacatcatgattataacaattctcatcacttgggaatttgcaacattttggtttagttataggagtgcaatctaaatcgatttttctcttaatcttgaggaactttaactatcttttaagaattttttttttgagatggagtctcactctgtcactcaggctggagtgtagtggtaaaatctcggctcactgcaacctctgcctcccggattcaagtgattctccctcctcagcctcctgaatagctgggattacaggcaacggccaccacgcccagctaatttttgtatttttagtagagacagggtttcactatgttggctaggcttgaactgctgacttcaagtgattcacctgcctcagcctcccaaagtgctgggattacaggcatgagccactgcacccggcctctttaaagaaaatttgaactgtgatttctggccattaaggtgactataaaaggataaaatacagcaaggttcaaacttttgcaacacctgcctcttcaatatctctacttggacatttactagagcatatggaacttaatgttctgtatgccaaatccctggtttctgcccctctcacacttctccatctgtatctttcttcctcgtgttgctggtatttccatcctgccagttgcccaaacaaaaaactttggagtcatccttgatccctcactttcttccatctctgacatcaatccaccaacaaatcctatagattctaacttattgcctgggttatctcatagcctcctgacagattgctctgtatctatccttgggaaaggtcttgggagatcaaggatatcctcttgaaaacatgatttatatcatggcacacttctcctcaaacatgtgcagcgctccctcattttatccagaataagaaccatattcattgctggaacctactagttctacatggtctagctccccaagccctctctgccctctcttcctgttatcctgctcactcttatctccatcagccacactggccgccctccctcttctccctctctggacgtgagtttttgctctagctgttcactttgcctaaaatgctctcttttcatcttctgaaatacccaccttatggatcatcttatatatttatgtgtacatatatgtatacacacatgacagctttactgacatatataactaaaccatctaaagtatacaattcaatgatttttagtacattcacggagttgtgcaactatcagcacaagagaaattccataactactagcaatcactgcccatgcccttccattcccagccctaggaacctaacaattcactttctatctctgtggattttcctactgtggttattttatataagcagagtcatataatatggggtgcttattgaccaatttagtttacttagcataatgttttctagattcatccattttgcagcatatgtcagtacctcttttctttgccaaagaatatctcactatattgatataccacattttatttatccattaattagttgaaaaatatttgggtcattcacttattgactataatggataatgcagcgatgagcattcatctacaaattttgtgtggacctaggtttccattcctctttggcatatacctaagaataaacttgatggaacacagggtgggtgtgtgtaactctggaggaactaccagacaattttccaaacagctatgaatttaacatctccaccagtagtaaatgcaggtgcctttcttcccatccttgtcaacacttgctattgtctgtctttttgactatagccattataaaagtgtgcaagggtatctcattgtggttttgatttacatttccctgaaagctaatgatgtcagtgtctttccacgtacacctaatttactgttaaccctttgaatctttgctttacttttatcttctcaatgagacctatcatgagcaccttatttaaaagtgttatttgccccagcccctgcaccttcaaagacttcactcttttcttaacacagtacttgacatcatttcaaatgtcatatggcttatttattacatttatgattactgagggctttctcacttcactctgatctatttgtgaatgctcaatgacagcaaggatctttgctctgatcattgatcatatcccaagttcccagaacagtgtctgaaaaatagaagacacttcaacaatatttgtagaataaatgagtggaatgcagagaaagtcactgcagaagggacaaggcaataattgtagtgaattaaagctgcccaagttgcgactgggtagcatcatgtttttttgcatcatctttgtgggtaatatgctgcaagctttgctactctttcagtttggccactttttaagatggcgtttctagactacctcaccaaggatatttaaggacacatgcaggacacctacatgtcctggaatgattttaaaagagtccctggaagtttcactgggactcatttgcacctttggcttggtgagaagactcacttggtgagtagactgacaagaatttttcatttccattcaaaccataccagaactggccaccttaaaccattatatttacctcagaggtgaggggttttattgatataatgaaaacatgtattcaagactattttttagtaaaaggcaaaagatggagttgagatgtagagatggagttggagaggacagcactcgtgaactggctataaataccggaacagataagaaaatgctgttcataagccaatatctaatctatatggccttaaagaagaagtctcaggtgatatgtatctcatatgggtttcagaacattcttccactgtttttgcttttccataccaactctagtaaggattggtgtaaatacagtaacatgtctatcataaaaataacgatgaataccttgtggaaatgataaccattttcttagtaaaactctcaatgacagtttaatgctgttagaaacaaaatattttattctctcataacagagaacaaattatatttagtttattggtaagaatgcttttgatctgctatacacatttatgaagatattagctttttattcagatatggattttaaaacatcttttggcatattcctgcctttgtgctccttgaacttgtgaactcagctaacttatctctctagcatacttttttaggctcttttgtaaacatttcagttttggcatgggaataagacaaaaatccaactgtaatctcagagatgtaatgctctgtggaaaaagaaacaaagcattatggcaaggaaagctttgggattctggttatttctgtatatccacaaaaagcatacaatttcaaatttcaatggccaaattatcatctgtctgtgattttattctgatcatcatgatcctcaacttatcagtataaagactgaactgggaattatacaacaggataactaatggggaaatagtcattgatgggaagttctgaccatatggccaaggtaaaggaatcctaggagtttgaagtcagacttcattaatcaattattaagtccaagactcaaagactgaaaaactagccagactttccccttcagttacaacctggatctagatttagagaaactgcatgactcaggtagtgtaacccagcatttaccttttgtgttcagtgaagacaccaagttttaagaaacactgaataaacaattgaatagttaagaaagcactatacttacaaaaggcacatttagccaaacttttccactactgggaatttcttgcctctccacagcactcatttgccatctggttagctttttaaaggcttttaacagcaccaacaaagaaagcactttgggcagtgtttaacccaaatacctatgtgttcatatactttgtaatttggatcttgccatgatggatgatcattcccaatacttcccaacccccagcaatgcacagttctatatcttgcagcatcttgaccagaaccctgtctgattaaccaattttattatttttcctaagaggctgatcctggtctcgcttggttgccaaagtgtgacatgtcttttaaatggacaataaaccaatcttcagtggcaggataaaaaaaaaaaaaaaaaaaggagttgactctccccaggtgaatttatatttccctatctcttactaaaggcaaaatatgcctagttctatgagaaatagcgtgtcaagaattattctatggtggccccagtgtgttattttatattgacacttatgaacattcttattttttattatactttaagttttagggtacatgtgcacaacctgcaggtttgttacatatgtacacatgtgccatgttggtgtgctgcacccattaactcgtcatttaacattaggtatatctcctaatgctatccctccccctcccccccaccccacaacaggccccagtgtgtgatgttccccttcgtgtgtccatgtgttctcattgttcaattcccacctatgagtgagaacatgcggtgtttggttttttgtccttgtgatagtttgctgagaatgatggtttcaagcttcatccatgtccctataaaggacatgaactcatcattttttatggctgcatagtattccatggcgtatatgtgccacattttcttaatccagtctatcattgttggacatttggcttggttccaagtctttgctattgtgaatagttccgcaataaacatacgtgtgcatgtgtctttatatcagcatgatttataatcccttgggtatatacccagtaatgggatggctgggtcaaatggtatttctagttctagatccctgaggaattgccacattgacttccacaatggttgaactagtttacagtcccaccaacagtgtaaaagtgttcctatttctccacatcctctccagcacctgttgtttcctgacttttgaatgatcaccattctaactggtgtgagatggtatctcattgtggttttgatttgcatttctctgatggccagtgatgatgagcattttttcatgtgtcttttggcttcataaatgtcttcttttgagaagtgtctgttcatatccttcgcccactttttgatggggttgtttgttttttttcttgtaaatctgtttgagttcattgtagattctggatattagccctttgtcagatgagtagattgcaaaaatcttctcccattctgtaggttgcctgttcactctgatggtagtttcttttgctgtgcagaagctctttagtttaattagatcccatttgtcaattttggctttggttgccattgcttttggtgttttagacatgaagtccttgcccatgcctttgtcctgaatggtattgcctaggttttcttctagggtttttatagttttaggtctaacatttaagtttttaatccatcttgaattaatttttgtataaggtgtaaggaagggatccagtttcagctttctccatatggctagctagttttcccagcaccatttgttaaatagggaatcctttccacattgcttgtttttctcaggtttgtcaaagatcagatggtcgtagatatgtggcattatttctgagggctctgttctgttccattgatctatatctctgttttggtaccagtaccatgctgttttggttactgtagccttgtagtatagtttgaagtcaggcagcgtgatgcctccagctttgttcttttggcttaggattgacttggcaatgtgggctcttttttagttccgtatgaactttcaagtagttttttccaattctgtgaaggaagtcattggtagcttgatggggatggcattgaatctataaataaccttgggcagtatggccattttcacgattcttcctacccatgagcatggaatggtcttccatttgcttgtatcctcttttatttcattgagcagtggtttgtagttctccttgaagaggtccttcacatcccttgtaagttagattcctaggtattttattctgtttgaagcaattgtgaatgggagttcacttgtgatttggctctctgtttgttattggtgtataagaatgcttgtgatttttgcacattgattttgtatcctgagactttgctgaaatcatcttaaggagattttgggctgagacgatggggttttctagatatacaatcatgtcatctgcaaacagggacaatttgacttcctcttttcctaattgaataccctttatttccctctcctgcctgattgccctggccagaacttccaacactatgttgaataggagtggtgagagagggcatccctgtcttgtgccagttttcaaagggaatgcttccagtttttgcccattcagtatgatattggctgtgggtttgtcatagatagctcttattattttgagatacgtcccatcagtacctaatttattgagagtttttagcatgaagcgttgttgaattttgtcaaaggccttttctgcatctattgagataatcatgtggtttttgtcttttgttctgtttatgtgctggattatgtttattgatttgcatatgttgaaccagccttgcatcccagggatgaagcccacttgatcatggtggataagcttttggatgtgctgttggattcggtttgccagtattttattgaggatttttgcatcaatgctcatcagggatattggtctaaaatcctctttttttttgttgcgtctctgccaggctttggtatcaggatgatgctggcctcattttagggacagaatattgtagcaaagtataggaaatgtgaaactcgaacaaataacttcttttctaagctacagttcagtttcttagcagcctttcttttctttataagcttatggcatttaaagtcactttcctcatattttttctccttgtttgacaattttattaaatggtctgtgacatagttgcaaagatagcctaacaatatctccttactgaccttctatttagtgatgtaacttcctattctttgttaaaggagtggaatctactttctctccccttgaaacagctggactcagggatttactttgaattctattcacagaataaaaattccataaaatatacaagacttcagattataatggacagtatgatgtgatagaagtgaagttgcatgactttcaaagataggtcagaagaaggcttagatctttcacctgttgtcttggaatgattcttcttgaaatgtagcttctatgttgtgagaatcccaagcaatatggagagaccacgtgtaggtgctctgtaaagtaatctcagctcagcctagccttcagggcactcctgcccacatgccagatgttgaagtagcctccaattgatttctgtttccatccatttgagttactcccagatacttgaatattctcagctgtagcccagaaagtatgtgatattctcattgtgagaagtgaggagcccattcctgctgtgcctttcctaaattaatgacccaaaggcaggaaaacaaatgagaaagccacttcttcaaatacaggctatttttcaagaaaaaggtaggatgacccaaagcatgcaaccaaggcccccgaggacaaaaccaagagacacatgaatagacatggaataatgtgtgtttctgttaggaaaatttccacctgataaaccaaacaggttccctggtaagtggctttgaggagccagggagggagaaagtaagatatttgctggcttcgtggattcaccatgtttcacagtctggatcctacttttcagagactcacaaacctgattttacggacttacagagaataatttcatttcccaaatgcagactcatgttggcctatcctatttgattgatacataaaatcagaattttgattcattaaattgtagtgagaaattattgtcactataattcaaatgctcaaagactgtgatgagcagaaaattctctctgtgcaggcaaaccttttttaggcaataatatagagaataattttgaagtctctttattaagctggaatcaggcaaaacattgtgtgtggttggatggaattagagggactgactatacactggcttcatctgagatgaaggctagatgaggactcatctcatctagcaacaggggtggcttttcaatgtgcattgatcctccattccttgtcactatctcaatattggcaacgcctgcccaaaggactaggcaatggaaaatataaggttaaatcttcattctccttcattctctctgtgctgtccttgagtgagggctaacagtgttttctgcctgtaagtctcatttactttgcttctatggcgcactacattcccctacagattaaaacattcttcttttagatatgccaatgaagtcaatcttgctacattgaaatctttcatatctggggaccattcttttttcttaaggcatactgcgtatttttttatttacattgtttgtacttccaaaatacttcaaaaccattctctctttgtccatagagttacactcaactagaaagattgatttatccatgatctattgtgtccatgaagtcgtctgcccttttaaaatattaattcagggccgggcgcggtggctcatgcctgtaatcccagcattttggaaggctgagttgggcgaatcatgaggtcaggagtttgagaccagcctaataaacatggtgaaaccctatctctactaaaaatacaaaaattagctgggtgtggtggctcgtgcctgtaatcccagctactcaggaggctgaggcaggagaatcacttgaacccaggaggtggaggttgcagtgagccgatatctcgccaccgcactccagcctgggtgacagagtgagactctgtctcaaaaatgaataaataaaataaataaatggataaataaataaataaaatattaattcagatgctgcattatgacatgctaaaactttttcctagtgacttcgcattctgtattttttttgacaaacctgtattccaaattactcgttattttcttcttaatcaagtcggccactggtgtatttgtaatagtggcatgtcttacattttgaaattgcctgaattcattgggattttgtcatatttacagtaaaattttatttttccaaatccctttgtatgaaagcattagaaatccactttcaactgaagtagattttttaaaaggagagtttatttttgcttttataactgagggcatgatcgtgggcctgagtctgtcatcccaatgctagatgtttgttctgttatttgatctcatttcattgatctcactcactgatactgcagatgacttcatttatgtagccttggaagatgactctagaatccaaattatatcgtctttatggcttgacatttttaaaaagaacaaacttatctcttccaatatcagtcatcaaatcattgtaacttggccccaaccataagcggtttttgtgtgtgcatgtgtgtgtgaatgtgtgtgtgccaggatcatgaaatacttagcttggcctgtgtaggacacgcatgcagtaatggcaggcaaactttgagagccacagtaggatgcatgcaatgagtatgaatggcttcctgaaagcaaactgggaacttttaccagaaaaatgagaatgtcactttgggaatgatgtaaagagacaacagcgtttctttcttttcttttcttttttttcttttcttttctttttttttttttttttttgagatagagtatcactgtgtcacccagactggagtacagtggtcttggctcactgcagcctcacctcctgggttcaagcgattctcctacctcagcctcctgagtagctgagactacaggtgcatgccaccacacccgactaatttttgtatttttagtagattttctgtgtgtgagtctctgactgctggtgacccatggtcagaaaaatggagaggagtttgttttaaccattcaataaatatatattaaatatttcattggattttgtttgtttttatctgtcattattgtatgtctcttggcctcaaaacatccgcagtaaaacttggaatcttctaatgcatctcagtgctctcaaggaatgatctatctattccctaattaaaaccagatacttagaagtcatcctctacaccatcttgttgctcactctcgccaagtcctgtcagttatacatccaaaaatatatctccaatccatccatttctcagcatctgcatcaccaccacccctagtccaagaagtcatctcttgcctgtgctattgtagtagtttctgactgttctctcttctctcattcttgtgatttccattagtttatctgctctgcagacagcataattttcaaaaacatgccagacatacctgatcgtctctctcaactgctggaaatgtcaccgtggctttccattgttcttcagtgatggagagtgctgggcatggcctctgaggcctgttttctgtggcttaggtcacccttctggtgtcttctcacatgtactctccagccatgctagccatcttttcattcctcaaaaaaagttatgcttcttcctcacctccctccatgttcctcgtttatgcacttccttccactcacaccgggccttatttccaaagctcattctcaactgggagtttttgcctttgcagttatgtctgcctggaatgctcagatcttcacatgatgaactcatcattgacattcccatcttgcttcaaatatcatcttcttggtcttccccaactaaagaatcattctccaacatattatctcagtttgttttcctaatagcatttatctctttcttttttcttgtttcttgtctgtctccccattagaaagagcagtgtgactgtatcttcaatgtttggcatgatgcaagaatgagtaaatgaagaaaagccttaaaatagcactgccccccgcaacctggatctttcttttaaatttacaccttgtggaaagtaagtttaattgagtcattaacacatattttggagcaagggcgcttgagttcaaatcccatttctatacttactgactgtataaacttggatgtactactgagctactctgtgacttaattttctcatatttaaataaagacagtaatatctaccttacagagttattacaagagctacatgagttatcataaatagtgaactgaggatactgcctgacacacaaccagtgccctgtatttatcattactattgtgtaaatattactgagtgtatattaaaatgaatctaacaaaagtttattggcaaaattgatgagcattgtttataattttatgtaacaaactggaaaacattgaaataatcttacttaaatttctaaaaagtaagatgcaaagaaggatctcaattctaactaaaatattaagacctaacatgtgtttaatactatatcatttagaaaactacatccttgtaggaaatcacattacactgccaacatccctaggagcagatattaccattggcttaaaagtgagaaaatggaggtgctatgatgttcgtaggcttgtccagggctccttgcacctgacaagtagagtcatattttaaacacagatgtttggacaccatgttcagcacatcgctgtgctgtttcacaccttttgtttaatactccatatacagcctatgcatttgcttagggcatccataaaacagaagttcccccacaaatgagaaaactatttggaaataattagatatttaattttttttcagttttcagttttttattttgttaaaccttcctatacttgcttatggttttgcctgttttcaccttcattggcatgtgtgtgagtggcactacaatatttttcagactttagactctctaaagatccaaatctgaccttacatggacccacatattggcttggcagaagcaagttcttgagacttacataccagtgataactgttaactctggttcttttgtacttaaagctatctctgaaagacaagaccacacatagagcaaaactaatgatatagtttttatctcaaccatttcttggctttggtgctgctgagggcagtgggagatggaggggagagggtatgtgatgaagcaccgatactaacaatgtttgacgcacatggccctgcctccctacatggaaagtagtcaattcccctaaaccatctcattctggcaggcagacagccatcagataataactctgaactctttctcattggagccaattttgaactggtggtctggagagaaattccatattgaattacactagttccaatagaattgtttccaacagtaattagggccaatggaatgctcattccttaaaacagtaccaaattccagatttttctaaaataaaaagctagactctggctccattgattgcatccatcccctcattgtggagtatggtaggatcttcttccaaaaaagtaagccatacgcttatgtgcagaaaggatgcctccgtgttctcttttttgctaccacaagctgcccacactattctagagagtaattgggagaatgagacattcagaggttgactgctcttgataagaggttttctctagctgggaatttgtcttggatttaatatacaatgtgacatcttggctttgtgattcagtggcagctacatgtatcaacattctctgaatccaaatcaaactctttttaatagatagtcatcttgatcaatagaggggaaaagcaatgctatctactagactaagatacttagcactattttcaacaaaggatgagaaaaccttctatttagaaaagatgaggtaatggcagttgttttcaatgagaagacccattcttaatggttagtatatggctgggaaatgttttaaagcattggcttggcttggtactgccttgagaactaataacctttgatgggagcctagaatgatatatcaaaagaagtggtaatgcaccaattttaaaaaattgatcagaatcctttttttagcttatacttttctactattcatagctctacaatggttaacagtagcgtctggatataccttatagcaataaggaccagatggggcccggtaaggcaagctgaaaacacatgtgtttgagaagctgatactaagattatatgccatttctgctggcttgaaaagacagaaccacaattatcatgtttttgagccaattttcacattaagtattttcttgaagaaattggattcctgctatttttccctttaccagttaagttctaaatgaacatcctatctcagatccttaaaaatcagaaatggcattgtgatatagttcatttaaataagtgtccctaaacttcctattttctcattccagaagtaaaagaactacttgatttaatagtttctgtcacctaaagttggtatttccccttttcttttgtgctccgttagcccttttaaagaaagaagtgatgaggattaattgtaatgatcccattcaaagcagaaagaagaactgatcatgggtgtatataacctgctcagttatttgcaaatgcatgtacaagcattatatcatgtgcgtaggaagggaaaactttaaaaattcccagattatacaaatcataagtttattcataaacattccaaccccagacttcagaaaacttcatctgtagacagattctcacttttcacaactctggaaggctatgcatcacacctgtattgaagtggggaggaattgccaaggtctctaaattgttaagaaataataaagaattaatagttggaggcagtttggcaatatgggatctggtgttatatactcaggcttgaatccatgctggctgtcttcccagctgtgtggcagaccatttgctggacttctctggtgctccttccttggaggagactaacggtgagctcgtgagtgctggctctggaagccaactgcatgcctgcaaagcctgtctctgccgtgtactgtggctgactgcagcacctagggaaacagatattctggctctgtttcctcatgtgtaacctgggcataataataatatttatctctgagggtcattgtgaggattatcttcctaaaaggaatattatttaaaaatggttaacacaatgcctagcacttagtaaatgagccatacatggaagctggtacagttactcaacctagcagactctggcttatcaaggaagagtgaataaaagtaacaatctgttcatgcctgcagagtccttttttttcttttaactgatcaaacgcatgtgaggttttaagcacccaggaggtcagattttataaaaccatcattgcaattagctagcttaggaggcaggaaatggaaaattgttttgaaaggcaattggccagaggatttcacaatctattttcttgtaaaaattctaaagttctacaaggggaagtggtatctcccacaaacacctgaatagcgattttattgtgcaactgattaactgggacttacactcatactacagtgataactaacatgtactgagtaaaagatgtttttgattctgggctgaattgctttacctctctcatttatttttcacaataatgcttggagatcacatcccttttttggggaaggtaaaggccaaattccttaactcattctttatggcctgtatggtttggccactgcagcctccagtgaaaacattatcccctcacccacaaccctccttttattaattcattcattcatcagcttttcattcattcattccataagtattgaccaagcgcccatgatgggtcaggtagtgctccaacactgaatatagcgagtccatgtcctttggagcttatgttctagtggaagaaacagacaatggaaataaatgcataacattatggagaaaaagtattgagaatgtgggaagtagaaagaggtgccattttagatagggtaggagagatctgggaaaaaccaaagaatgtataagagggagtagaccttgaatttctctggatgatggatattccacactgatggaacaaaaaagcaacagccctgaggccgggggtgcttgacatgttcaggagtgggtgagtggtggaagatgaagtcactagtaccaatattaccttcattttactgtctaggagactgagacttagagagactacaacatagccaaggtcacacagctagaaagtggcagaggtagggttggtgcccactgaacacttctggagtctgtgctcctgacttctctgatgcctacttcacaatattcttcacttctttcatgctgagggctctctgtgtgtcagcaggcaggacagggcagccctttctttctccctcaattccttaccccagttaaaaagctgatctaatttactcacatgtgtcttaacttttagaatgttgcttatctgactttttcacttccttcatcatttttatgattctaaacaccacagcttttcaaatcaatttgttgcctgggatggattttaggtacggatgcattgctgtggatttccactccctgtttattctagtgcaagagtgacttattcactaaagcaaataatgttcccctccactacctcatttggtgggagcagttgtagttcgtgtgacaatgtagggctgattctcatgcctactctatgagcaaatgtaaaatgtactgttttgtgttattatcacaaaaaaattacctcacggaacaaaatatagtttttgttttcttgttcctcctcttcccacaattatttaacctaatctacctatgactattgtcatgctaaaaacatcacatgagatcaaccaaaactacatattggtatgtacattttccgaaaaattgctgccgtcattttgagtggacgagtaaatcaggttggctgtttctcattttgcaataccattcatggagggtgcatgattattatgaccttctcacatagttatggtgatataaatccaatagaaaaaggggaacaaaaaagaatattttaacaggaaacatttattagaataagagtacagttactttatttaaacattttaaaacaggtaaaataggcaaatgattagaacaggaagtgggcatatttaataccatttggtgccacaaactgagatttttctgtacgttgtcttataaaaggcttcttaatgttttagctaagcagatcaataaggccatccttattgtttcttctctaattcctgaaagactggctgaagacataaaaatattattattaattttgactgaaatatgaacattataaatattactgaatggcctaaatctaccatgctggggtatggcagctcaactagtgcaaaatttttgttacagtaatctttctcttgtcaacaatcttgctttatttattctgcaccacctggcaatggcaatgtgtccaaatactataggagtgtgaacagctctgctattttttcatagcatcaaatatcgcccccaaatcccaacagatctgtgatttgtagaattttttgcaaaggctgcaagtgactcatatttttaaattgttctttatgtgagattctagtgaaattcaaaagatccttgacagaaaagtgtagcatgcgaattagagacggacaaatggaggaaagcttttatgtcttgttttcagagtattttcacattccagaggtgattaaaagataaacgattataaagtctttagtaatacgtattgatttttagtgaacacatccttaaagtaatgggaaagattatggcttattttcttacttttatttagagtcattctgatgtagggaggcagaaatggtgtgtttgttatttcgttgatttgactacgtctaattagatattgattctgaactctgaacaaagtcgatcgtgagacaagctggaggacaataatgagtgaaggcccaagtttccttcatctttcccacaattagttattttttcccccacaatgagttcttgagttacaacaaaaaatgaatcaataatgatttatttaagaaattgggtcacagttatggatcaatgtcagctaatacaatataagctaagaaacttatagtcagtttaaagtaataagacatttgaaggataatatatttcaaagcatttccaattatttgcttctagatatagctaataaattatatccagactaccatattgctaaaggaatacatttaaatgaatagataagaatgatttgaaggaaatatgtttacctatagagtttgagtattttccctacatatgttttgcactataaagttacttaataaaattattcctgatatatgggagagaagaaacacaaggctaatcactgtctattcatcaattttaaaaattattacagatcaaacaaacgaggctttgctatatcaaatatgacttttagccattattccactatccctaagactatgtaattctcatctttgtaactgcagaatgtatcattcttacagtaaaaatgaaagaaaatgtttaagagaaaaattatttcccccagcatttgagattctgtctgtgtgggcagcaacagtgtcacttaaaactatttacataaagacacggcacatactggggtagaataatataatgacactttcgtagcattattctaaatctgatcttatttgaagaacgaataaaacccaaagaagcctcaaattttgcttcagaaatatgctgcctctttcagtacatattccagaagaatatcttgtttcataaagaaaatccaatattagagtgatactttctgtaatgctaagctgtattttaaatagcacgttggattttcatcagaaattgggcctcggatactaaactttagattccctagaaataaagtgggaaagtaaactccttaaaatgcctgcttagagaaattctgaagggaaatgagatggtctgtgaatgtgtttttaatttccttgtggaaaagaatgttcatctgaaatcaattttacgaatgctttttaaaagctagtgggccaagtacattctatttgacttgcaaagttggcattgggcctacccacatttacctgaactacccttctttttttaaaaaaattattgcagtatgattaatatacaaaaagttgtacatatttcatacattcatgaacaacatgataagtatacaacatgatgagtttgaaggtaagtatacacctatgaaactatcaccataatccatgccataaatctatccaccagctccaaaaggttcctcctgccctagttatttgttatatttttgtaataatgtcacttaacataggatccactctcttagcaaaattttaagtgtacaacacagtattgttaactatagtttctatgatgtacagtaaattcctggaatgtattcatcttgtataactgaaactttgtgtgctttgactaatacttccccatttccatctcctcgctccagcccctgaaaacctccattccactctctgcttctatgattttgactattttagattcatcatataaataatattttataaagtatttgttcttctgtgtctggcttatttgatgtagcataatatacttcactttatccatgttgtcacaaatggcaggaattttttttaaagtctgaataatatcatatattaatatatgatattatttatatattatatacataacatacaattatatattgtaatatatcctatatatgtgctatgtttagaagatataattatgtgttatataattgtaacattaacataatatttactattaataatagtatatatgacatgtatataccacattttcttcattcattgacagtcatttaggttgcttccatatcttggctattatgaataatactgcaatgaatataggagtgcagatgtagtttcatatgcttttgtgtttctgtttagcagtctttagtttcaacttgaatagctccctttaggacttctaaagcaggtctaatgatgattaactctctcagtttttgtttgtctgggaatatctttaaccttcatgtttgaagtacagggatagtattcttggttggcagttttctcctttagcactttgaatttagtgtctcactctttcctggacagtatgatttctgctgagaaatctgctgatattctcatgaggcttcctatgcatgtaacaaattgtttatctttcgctgctttcaaaattctttgtctttgacttttgataattttattataatgtgtcttactgtagactgcttttagttcaacctatttgggttctttgggcttcataattctggatgtccatttttttgttagatttgagaagttttcatccactatttctttaaatatgctttctaccctttctctttttcttatccttctgagactttcataatatgtatattggtttatttgatggtgtctcatggacttttttcactctatattattctgttttctttttgttcctatgactggataaattcaaatgacttgtcttcaagtttactgattttttttctgcttgattgagcctgatgttgaagctttcttttgaattgatcaactcagttattgtattcttcagctctagaatttctatttggttcttttttgtattttatacttctttgttgagcttcttattttgttcatgttttgtttttctgttattttcttagagatttactgtcttcttttgtagcctacttaacttccttaagggagttattttgaattctttctcaggaagttcataaatcttcaaaaaacctttcacaaaatcaatgaatgcaggaactggttttttgaaaaatcaacaaaatagactaataaagaagaaaatagagaagaatcaaacagacacaataaaaaatgataaaggggatatcaccactgatcccacagaaatacaaactaccatcagagaatactataagcacatctacacaaataaactagaaaatctagaagaaatggatgaattcctagacacatacaccctcccaagattaaaccaggaagaagttgaatccctgaatagaccaataacaagttctgaaattgaggcagtgattaatagcctaccaaccaaaaaaagccaaggaccagatggatccacagctgaattccaccagaggtacaaaggggctggtaccattccttctgaaactattccaaacaataggaaaagaaggactcctccctaactgtttttatgatgccagcatcaccctgataccaaaacctggcaaagacacaacaaaaaaagaaaatttcaggccaatatccctgatgaacattgatgagaaaatccttgataaactactggcaaaccgaatcgagcagcacatcaaaaagcttatccaccacaatcaagttagcttcatcactgggatgcaaggctggttcagcacacacaaatcaataaatgtaattcatcacatgaacagaaccaatgacaaaaaacacatgattatctcaatagatgcagaaaaggtcttcaataaaattcatcactccttcatgccaaaaactctcaataaactagatattcatagaacatatctcaaaataataagagctattaatgacaaacccacagccaatatcatactgaatgggcaaaaactggaagcattccctttgaaaaccagcacaagacaatgatgccctctctcaccactcctattcaacatagtattggatgttctggccagggcaatcaggcaatagaaagaaataaagggtattcaaataggaagagagaaagtcaaattgtccctgtttgcagatgacatgattgtatatgtagaaaaccccatcgtctcagctcaaaatctccttaagctgataagcaacttcagcaaagtctcaggatacaaaatcaatgtgcaaaaatcacaagcattcttatacaccaataacagacaaacagagagccaaatcgtgagtgaactctcattcacaattgctacaaagagaataaaatacctaggaatataacctacaagggatgtgaaggacctcttcaaggagaactacaaactacttctcaaggaaatatgggaggaaccccaaaaatggaaaaacatttcatgctcatggataggaagaatcaatattgtaaaaatggtcatgctgctcaaagtaatttatagattcaatattatccccatcaagctaccattgactttcttcaaagaattagaaaaaatactttaaatttcatatggaagcaaaaaatagctcatatagccaatacaattttaagcagaaagaacaaagctggaggcatcacagtacctgactttaaactatactacaaggctacagtaactaaaacagcacggtactgggaccaaaccagatatatagaccaatggaacagaacagaggcctcagaaataacaccacacatctacaaccatctgatttttgacaaacctgacaaaaacaagcaatgggggaaggattccctatttaataaatggtgttaggaaaattggctagccatatgcagaaaactgaaactggacccttccctcacaccttatacaaaaattaactcaagatggattaaagacttagatgtaaaacctaaaaccataaaaactttagaagaaaacctaggcaataccattcaggacataggcatgagcaaagacttcatgactaaaacaccaaaagctataggaacaaaagccaaaattgacaaatggaatctaattcaaccaaagagcttctgcacagcaaatgaaactatcttcagagtgaacaggcaacctacagaatgggagaacatttttgcaatctatccatctgaaaaagggctaatatccagaatctatgtataacttaaacaaatttacaagaaaaaaacaaacaatcccacaaaaaagtatttgaaggatatgaacagacccttttcataagaatacatttatgcagccaataaacctatgaaaaaatgctcatcatcactggtcactagagaaatgcaaatcaaaaccacaatgagataccatctcacacccgttagaatggcaatcattaaaaagtcaggaaacaacagatgctggtgaggatgtggagatataggaacactttttcactgttcgtgggagtgtaaattagttcaaccattgtggaagacagtgtggcgattcctcaagaatctagaaccagaaataccatctgacccagcaataccattactgggtacatacccaaaggattataaatcattctactataaagacacatgcacacgtatgtttattgcagcactgttcacaaaagcaaagacttggaaccaacccaaatgtccatcaatgatagactggataaataaactgtggcacatatataccatggaatactatgcagccataaaaaatgatgagttcatgtcttttgcagggacatggttgaagctggaaaccatcattctcagcaaagtaacacaggaacagaaaaccaaacaccacatattctcactcataagtgggagctgaacaatgagaacacatggacacagggaagggaacatcatggaatggggggctatgggagggatagcattaggagaaatacctcatgtagaatgatgggttgatgggcacagcaaaccaccatggcatgtgtatgtacacctgtgtaacaaacctgcacgttctgcacatgtatcccagaacttaaagtataattaaaaaaaaaaaaagaaaaactgtcctttggttttctactagatttccactgggtctatgcaattcatttctagacaatagcatcaaagaatgcaacaatttttgaccatctggataagcacattgctagtcatagaaaaaatatataaagtattatttggaagaaaattctagtttctgccacacagtgattgacttaacataatcctatctcttgcaacatacatatagaaattatggataagttatatcaaaaaatatttgtaagttttctttcaaagaaatgaatggaaagccaatattccatagatgaagagatatggtaaagccaggatgttttagagagaatgtgtagtctggtgattagaaatcctgatccaaatcctcagtgtaatttgctgattcattccaatattaatgacaacaccaacaacaagccaaatttttgaataattcattgacataagtagatattttaatagaaattgaagagtaagtaaaaatgaataaaaatgtatacagcacaaagaaaattaagtgtcatacagtctaagtgctacacaagcagagatgtattgtttttaatctatgtatttggaaagaagattaaaggttaataatctaaaaatccaagtcaaaaaataacaatataaaactatagaataaaaaaagtgaaaattaattaattagaaacaaaagaacaacagagaggacagggtcaactccctattttctgaaaagattgatctaggagaaagaagaatattaagaatgtacaggggatggcaagatgtaatgtgtccatgttttaatattgtgtgtttacactaaagaattctctgtcaacatatttggaatttggaagtaacagataattttctgtaaaaatatgcatttatatatgctaccacaaatgattcaaaagaacacagaaaatctaatactctatgacccttaagaaatcagattagttgttaataaatcacctatccctcctcccacaaaatgcgcacacacataactaatacaactaaaccaaaaaaatacctactaggttcagattgttagccaagttacagcagatgttcgaggaataaataattcaaactggatacaagctcttcaaaagaataaagagattttcccatcccatcttatgctgcttttattactttgtacattgacaatataaaaaagggaaattatagagcaatctcacaactgaatgtagatacacatgtttaaataaaatccagctaccccaaatcctgggtgacataaaataaataacatcaggattaggtaaggtgtgttttgtgatgcaagaatggtttggcattggaaaacctacatgggcaattcactgcatgttaggatgcttttgacttcaagtaagatggaggataacaaaaatagcaggtattattttacaaaacaagaagccaagatgttggatgagtttagggctaacttaggagaacaactgtgttaccagggacttaggttccatttatttttactctttgcaatatttagtgtgtgatggttccctggacagctgtgtagattagttctttccatgttctctttctggaatccccaagcaagaatacattttatgtctcattggccagatcatgtcattcatttatatttaaaccaatcactgagatagataatagaattaccatagttaattcagactaatcaaaattcacccttgaaattgaggaggagtccagcttatgaactacatgaccaatctatacttgaacacaatcaatgttctcttagtaaggtagacctaaaataatatcttggatacagccggcagtgttgacatacaaagaggaaaatatgaaatcattttcatagttatagaaataacaatggatgaaattcaacattaattacagagtaaaaaccagtttaaaaaataagaaagtgaaataaattaacatattaaagactatcttccaaaactttaaaaagtatttatttacatccataagtgattaaagatgccagctattttcacctgtattcaacattttaatagctgtcattcctcctcagatatctgaaatggaatagagagaacctgcaataaaatgtaaggattcgctagaaagagaaaaactttgttgcagatattatgatcatctgcataaaatgtattagagaatatattgtcaaattaatatatgaactggcttaaagtgtttctggttacaaaattatatgtgtatgtatatatctatatattctttagttatgtagtcaagttaaaaatgtacctaaagcttaaagcacaaaaaatataatttataatagcagcaaaaacagtgaattagctagcaataaattctttagaaatcctcatggagaaaattataaaatatgttaaattaaaagtcctattttcctcaaattcctcggtaaaaaaataaacataccaacttgttaggattgtttgaagattaaatgatgtaatatgtttaaaccatttcacactgttccttgcaaaacaattgctaaaagaagatgggttttagtaaatttttataaaaatagttcattattttaagaacttacgaaatacctcctaagagctctgaatttcctctaagcaattatgaaccacacaatgacattcatatttttcagctaatttaaatccaataccccaaattcttatctaaaccaaagctggttccacccttggcaatgagttgtcttattgcttatgtacactgtgtgtcctctacccactattcaacttatgttttttaccttttaactgtatatttgtaagaatgttttatgctcccccaaagaaagcaaattctccaaatgtgtggataatccttcctccttttctttcccatacaacatgtggtattcattaatttattagttaaatatttttgagtgactactctgtacctggcactagtccagtttcatggaatacatcaataaacaaagcctgcaaagtctcttgctctcgtggagattgcattttagtgagggagacaatggctaaacaataaacatgagaaatcaggaagctatcatggaagagatgtttatctattctatttttacatttcctgggcacatagctagactatatttcccaggtcatcttgcagttagatgtgctctatgactacattcttgccagtgcgactggaagcagagagtgccattttctggccaaggctgacatgaccctgcatgttcaccttcatttgtcttctgacttcatgcatcccaaggtcccaggaaatgatggagccacagaatggaaggggccatgcactgaatcactatgtaaagaaaagctgccctctgaccagaaacacagcaatgactgtttcacctgtgacaaataaaattgtattgtgtttggttcttaagtggctttatttatactgcaatctagcattggctttatttatactgcaatctagcattctctgagtaaaataactatatgatcagtttgaaggtattctctgcaaagagaaatacaaaaacaggcaaggtagatgggcatggggtaccaaggtttggttgattgcaattttaattagaatggttagggttgcctcattgagaaggtgaaggtattagtcttctagagctgccattacaaatatcgcagacaatggatggcttaaacagaaatgtattttctcacaattctggaattgagaagtccaaagttaaggtgtaggtaagattagtttcttctgaagcctctcaacttggtatgtagatgggcatttccccctgtgtcttcacagaattttttttctgaatgtccccagctcccaaaggccagattgagtatgggctttatctagtgcctaaggtacatctactcttgtgagggggtgtattagtttgccagggctggtgtaacaaagtaccacagactggatgcttaatcaacaaaaatgtattctctcagagttctggaggccagaagtcctaaatcaaagtgttggcaggcttggttccttctgaggactatgagggaaggatctgtttcaggcccctttccttggcctgtacatggccatctttaccttcatggtcttgtccctatgtgcatgcctgtctcgaaattcccccgttttataaggacaccagccactttgaattgggacctacaacaatgacctacctttaacttaattacctctgtaaagactcatatttcacattctgaggtgctggggattaggacttcaacatatgaatttgcaggggcaacagttcagtccataacagtagtatttcacaaagtcttgaaataagtgtgaaggatattccagcagatatctcagggaagaacattctgttaatctcagcataatgactataaggcaggagtttgcctggaatgttcaaatcataccaaggagaccaccgttggtggagattttatcctagctaaagtgggaaaccactgtaggatttttagtggaagagtgacatcatctgatttatgacttaaagggactattctgggtgttttgatgagaataactgtaaggggaggtaggaagactagttaggatgtatcacaataaaccagatgagagttgatattcagttcaggttggtgttgggagtagtgataaatgaccaaattttgcatatgttttgaaagtagagccaacagtatttgcttatagtttgaatgtggggtgtaggcagagaagagttagggacaactccataatttttgcctgagcaactggaaggtgtgatgatgccataaaactgagatgtgagagtcagaaaagttgatggagggttttgttttggacatgagatgtctattagttttatattggtgttaaaacacgtgaagttgctgatatttaattgcatataactataaaattatcaagttagcatcattcaacctaatacaagtctgaagtttagaagaaagatctgggaatcatcagcgtaaggtgatatttcaaactgtattgtaagagcagatcactgtgatggtcactgtccaaccaggaagcagaaaccataccattattttaactgggggatgcaattaaaatagacgttaggtattagagcaacaagaagacaacaaagcactaataaggaatcacatatgtaataacttcacaccttggctggggaagcaaaacagagtttgggattaatcaaatttaaaggcttggaagagaggtccatggggctagggttcagacctctgaggaggtgacaccatgtgcctggtgtttctgagagggcataaggagactgattgtggtaatgtagggtgcgaggaccctacaatctccccaaggaaagtgaaaaactgccactactggaattagctgtgtcttccagtgtgatgggccattgtggttcaagtttcttctccctctcccaatcttttgatttacctgtcgcacctccaaatggcagaacataaatgggaccagcagacaaaagagaagtgtgatttgcagagttcctgtcccagcttcaccaaacagaatgtggaccaggtgtcattacagtctcatggctgtaatgtcagcactttgggatgccaaggcaagtggattgcctgaggctaggagtttgagaccagcctgggcaacacagcagggccctgtctctacaacatatttaatatattagccaggtatggcggcaagggcctgtagtcctaactacttgggaggctgaggaggaagtattgcttgagcccaagagttcaaggttgccctcagctatgatcatgcctctgtactcctgcatttaggctggaacaacaacaacaaaaagcagaatcaccaagagtgacccaaagagtgaatgtagacagtgcttcaagtcctggaatactcccttgaggcatcaagcagaataggagcaaaggagacatagaaggaacaatcagtgaggttggaggaaagctaaaagaatccttgatagcccagtgaataaagcgctttaaagaagaactgtttatcagttgtatacaatgttaaaaaaaaaaactagtaaattgtgaatcaagaattaattaatgtatttcactatatatagtcattggtgacttgatcatttggtgaagtggtgggaacaaaaggccttttgggattttaagaaggaaatggagtagagaaattaaagacttcagtatacagagcattttggggatggcatacatagcattcaatatacatagcattttgctgtagtaggaagcagagaaattaggcaatatttagaagtcaagatgagatttccttttaaacaatgggagaatggaagcaggtttgtgtattgatgggaatgatgcagtagagagggaaatatggattgtgtaggaaactgactgaacaatttctgaaacaatgcccttgggatggcaagaagaggtggaatcaagtgcacacattaagagattttctttaggttggagcatggatagtgcatctctgatcatagaaaggatggtgagtttgtgaggacagatgctggaaagcatgcagatgtggtagaggaatttgttgacattctttcctggttccttaaaaccttgcttaaattttccatgtcatcgactgagagtgaggagagctgagaaaaatgtacgtaatagcgaagagagcaagtcagtcaatagataagcgcaggaaattagactctaactcttacagccgcagttttttcaccttcaaaatacagctaaatcctaatgctttgtgcaaaataagagttctacaattccctcacaaaatgaagaatatgatatgatgttagatatatatttaatgctgagatctacacaaaataaaagctaaataatttcatagaaaaatatccagggagattaattatatatatattcatatacatataattaataataataataatcatatatatgaaacttaaaatttttcaaaaaatcttttaacacaaaaagttatctttcactttcggtattagtcccttctcatgctgctatgaagaaataaccaagactgtgtaatttataaaggaaagaagtttaattgattcacagctctgcatggctgggaaggcttcaggaaacttccaatcatggcagaaggggaagcaaacacgtccttcttcacaaggtggcaggagagagaagtgctgagcaaatggggaaaagccccttataaaaccatcagatttcctgagaactcactcactatcttgagaacagcatgaaagtaaccgcacccatgattcaattacctcccaccagatctctcccaggacacatggggattgtgggaactaccattcaagatgagatttggatggagacatagctgaaccatatcactttccaatgaaaatgcattttaaattgatctattacatatgcatgatcataaaaaaaattgggttaaaaatcattaaactgaacgcttcttgaagttggagataatgtcatgttaagtcttcagcattaaatgccagcactcatttgtagtagcagtccagtaaatatttttgagctaattaatagagcaatgctaatatgtcaaatatttatgagagaggaagagagagaaagagagagaatgtatcagacaaaacagcattataggtaatataaaccatggtactggtccgtggcctgttaggaaccgggcctcacagcaggaggtgagccactgtgggcgagtgagcattactgcctgagctctactttctgtcagatcagcagtgacattagattctcatagaagctcaaacccaattgtgaactgtgcatgtgagggatcttgcatagggttgcaaactccttttgagaatctaatgataagtgtaatgcacttgaatcatcctgaaactattctccccaacccccggcctgatccatggaaaaactgtcttccatgaaactgcttcctggtgccaaaaaggtgaggaccactggtataaatccttcttttctgaagcgataaaatgtatcctcagtcttgttaagatatttctgagtctagtaacaaagtatctgataactaaatatataagaatattctctttttcagctattattggatttataactttgggaacgcaagcagtcctgaataattattactgggacaaattaatacttcaggtttaatattttcttttaaaaactcctcatgggaggacagattctttgtactggtaggtcttaaatgagatgctaaaagaaatggcagcagagattaatggacaaataatagtatctgtccaagaactaatctgggaagacagcatgacgatttttacggttaggaccatgtaaagaatatattttctgctaattgagaattagctgtctgtaaattacatgcccaattttgaggttaaagttctttttacatttaacttataattcatgctatttttcttctcaaatatcctaggccatggctatgtcagatcattctttagaagaaataagtttttcctcttgcggttttgaggactaatgaagttacagaaatcatttgtaatctagtgcatggaattaaagaaaaaatgtcaaatgtcttttatttttaacagttttcttgaggtataatttatatatcataatattcaaccatttaaaagtgtacaattatttaataaattttagtaaatttacagagttgtgcaaccataactacaattttataacattgtcatcatcctcttaggattctacatcccatttgcagtcaagcccagtttccactgccagctttggtgaccactaatctacttttttttgtggatatttcatataaatggattaggcactatgtggtcttttgtgttaggcttctttcttttcacaattttgagaattatctgtgctgtagtagtttgttattttttattcccaatagtatttcattgcttagatatagtatatttcattcatctgttcacaagttggtgggctttgggttgtttccacttttgggctatgattaaattttatatttactcagcaagttcaatatttccacctggacatcctcctccacatcaggttgcattccaaggaggaacatggtgtttgggtgcctggtagtctattctgacttccacacccaaatgaagagcactctagcgtatggtccatccactcctgggatgccctgactttgggctcaggtgttggaaactgcttcttccatcttcatcagatggagctggtctggtcttggatcatgcttcaattatggttcacttttccagctatcctcctagcctgttgcagtttgtcagtgagaatggtttcatcccctaattgccaggatccatatattgaccttcaccttgggtgttcagcctctgttttctagaacataggcaataagtctgggtgtctgcatctaaaggggtctccatccttgctctcttatgttagttagggtctttctggtttgcaccatcatatctttttaatcatattccttgggaacaagaattagaaatgtaggttttgtactttccactatgctgtgggctcctttttcacaaaccgatttggtagtcagtttttgcatgctaggtgtccttaaataaatttcaaaagattacctgcttgccctgtagttttctaataaaaacacaagaaaaacaagccaattaaaacacaaaaaggcaaaattatgcccctatatactggccacaaaaggacttcataaagacttcaggagccaaaatcagttcctttttggcaaaggcataaatgtctagttctaaataatgatagtttatttaaccatgattgccaccctcatcaactcaaaacctattggaacttctattgatatcaaaatgatagttctgtcactggtgaataagggagactatttatacagtgcattattcaaatgcattggaacagggtataccttctttaacaaatgccctagtgttgtcttggaatctaaataagggtgggcaccatttcctaagttcaacccaaaatgcctgcttatctaaccagagtcaacacaaatccagggttttttttttttttctctttctttgcttgatttcctgggcaaggaagttcattccttctctgttattctgtagggggcttttcatatctactttctaggacttatcctcttttactgcaatttacagtttcattgcaatttataatcttcaatagattataaagttctttgatgtataaatgctttttctttcctgcaaattctcacaatttaatttactttacaattggcactaaattagtgcttgttgaattgataaatgaatgaggaaatggtgaaatagttgatacttaacttctgctatttgctctttattgcaaattgtttgcgaagtggactatgagatgaagtttagtttgcagaatgtttattagagtgcccttgaaaaataaggggagtgtattcgtgcattcttgcactgctataaagaaatacctgagactgggtaatttataaagaaaagaggtttaattggctcatggttccacaggctgtacaggtagcatggctggggaggccttagaaaacttttaatcatggcggaaggcgaagaggaagcaggcatgtagtatgtggccagagcaggaagaaagagagggaagtgggaggtgctgcacacttagaaacaaccagatttagtgagaactcactcactatcatgagaacagcaagggggaagtctgctcccgtgatccaatcacctcttaccaggtccctcctccaacactggggattacaactggacatgaggtttgtgtggggacatagatacaaatcgtaccagggaggaagtgggattgggcccagaaattgttgagctgtgtgaaattccctatgatgaccccagctaaccatgcacaaagctctgaagccaaaatgaccagtaggagttgcccatattgcattgaaatggcaacgccatcatatccctcttccattagtcaatcattcaatgtgggtcatcatggacagggtgtggtctgggcccagttgctttctgctacaaagaaatccctgaaggtgctgacaaggggtccttccctgtagcagatctgggttgtgcatctctgtgtccatcaagtctctctttttctttcaaccaaaatgttagttaaggcaatatcatagtcacattctgctgttttcttttcccaaattttccgtttctattacaaaagactatgttgaattctgctatgttgccaaaatagcattttgtgtaccataagtattttttaaacgttgcatcaaatttttggcataaatgaccaataattttagtttaaaattaagagcagagacttagaagacaaatggattttctaatcatttcagaagtgtcctaaaattattctgtttcatcgtttttggtagatagttcttcctctgtcaacatatgtgggagaagttgttttacattagtgagactcttggatgaataatttatcaaattgtcagcagctgtttttttctaacaatatattttaatggactagtcctatttcatttttcaaacttaaaaaatttaaattttctaaaaatatattgacaagctttttttcacaacttcttctgtaatatcaaagttggcagtgattttctgtctccctatgtatagtatcagaactgagataattttttgtagatatgtaatactttatttttcaatattaagatttctttttgctgacagcctactgacctattcattttggtttctaataatctctctttttcttatacaccattcttaactgtaaggttaattgtaagccaagaagagttaaaccctttgttatgttccatgttctgcatcaccaggggataattggtggatctcttgtttctgctgatgttcccatccaaaagattaattttacttacacagggctttgcacatgacaatgacaattctttattagatggttcccgggaggtgtagctaagccaataaagataacttttacttgcattaccaggtgatgttggccatttcctatttataattctacttgttgagtgactggtcttacagaaagtttcatatgcattatcttatattaattatcatattggctttgtaaaacaagtactatcacctgctctttaaataagataaacctgaggttcacagagagttgaaatgattttgtccagagtcctatagtaaggaaacaccagacctcatattcaggtcttctgaagtcaaatttctagttttcaagtcctccaaattaggggtgtactagcagagtccatttagaaaaggtgtaactattgtacttatcacacgtgcagtgtaggtcatagaactggcactggttaattcaataattgactatgaattagattttagagagttatagaaattgtagaagtaaatataaagaagtacattttggtacttatctcagtcctgaattcccataagatcaattctcctgtaaaatgatagggtgttatgcttaaacagggcagattgaagacatacttttcttttcccctctgaaaagttcagtgaaaagagagtgaaggaatcaaaaggcatttacccaactggtcaaagagaatggggtagcatccctgcctgctacatgtactgcaagtactattccatctgctaggtcatatggtgtaagtgaatgagcagcttgcacagtacactgtacacattacagagatgtattttactctgcgccccactcaaacattctaaactggaagcctaacagaggtctttgtaaattatttgtttcatacacgatttatgtgagtatatcttgcctccagtattcagataggttgctagctattatatgcctttcttagtggtagaagatatcagatacaagatttagcccttaattttggagaatagatctcaacgtgcttcagaactctcaagttcctggaatttcactgaagtagcagattgctgaaattttgttggatttatttcctactctctggtatgcatgtattttgccagaatatttctacttccttttcaccacattcaatcagcatgctatcaccagtatgatggactagcatagtatcttgtggaatgcaggatgataagagtgtctctggactagattatgacacaggactgtacatttcatatatccctgaagtaggagagtgaataagtatttctgtgtttgtctagtagttatagaggaaaaaacactcattagactattcgctgcatgcctggtcagagggactgtattatttccagcaaagaacctcatacagaacatgatctacaattgaagttgccacttgattaaatttatagtaatccattgtcactctttgagagctgtctctcttccacataggctgaatagggtaattgaatgaggatgtgtctggtatctctgcaattctcccaggaaggcagtattgattctgatttactattttggcacacagtggcaattctagaggcttcctcttggcttttcctactacaatagtcctcactttatgggtcaggagaacaacatggggattctgccagttgctggttatgtctcttccaactgtaatttccaagactattaaaataaccacacagtggattaggaactcaagagacccatcgttagatggatcaaaggcaaatcccattaatcacctggtttttgtaaacccctactctgtctggtaaaccttaatcatgtttgagttcctaggaattattgtcaattaaaagacggtgtctagtaatccccccaacatccgagtattttcctttcttcaatttactgctttggtaagtgatcccacgtaaggtctcattggagaaaactaagaagaaaatatacagtgcaaaatgttggcattgtatcagatttctttaaaagaattcagccttccattcaactggctctaaatcagtgaactgcatcaagtcttgaagtttactggggagtcttgatcctcttgtgatgattcaagtcagatttctcttcacaaaacttaaatttcctcacttgcagaagttaagtaaaactttgaaagagtgttcatatatttcagtcctggggacaaaaccaataatctcatgagacaaaccattattgctttagctgtgctatccattacagtaattttgtccatgtccaccttgtctctatgtgttaaattataccacgtagacaccatcattctgaaatgccatcaacctcacgggattcaaaaaccccatttttatagtagcaactcccattcttattcctggcttaaagatatcatccactagaagagttttcatggattctgatgcttccatcaaaaatgtgttttttgaaactctggtaagggtaatatcctgaatgttctagggtacctgggtaaagtacgactgagtaggtacataatattactacatgttgtatctctctaatcctttagattccgtcctaaagtattacatgctttcctctagactgagcataccaagggatttcttgcattccaactttatttggcataggccactgttgtcttcaagaaaattatgagagctactctctgccactcaagctatggcacagaatccagaatatttggagtgtgtactacatcaataaattcaacccaatccaatatcctaacattttctgccatagtctattatctctagaattcattcccatatatattattcaggtttgtactagcatacattggcaaaattttaaaattattctcatgcatatggggcttcagctagcttatgcattgttcttatccttctgggacttgctgagatttgagtctgttataagtctagaagctatgagaggtgataagagtgggtcttgagaaggatcattattccctttataactcagttacctcagaagagtttaatacaagtcattaagacaagcagaggcgaatgctctcaaataagagagaaagtaccacttctatttaaaaaatggcatggtggatttgagtgttcacagtttttattttcatcagaatctgcccatataccccataccaattttcagaattttactccttcctaatcaaaactttaacctcatcataaggggcttcacaagattttgaatttaatttgttcacctgtagcatcacactttgagcttggttttcagaaacgttgaccctatcattagagaagataaataatttatttaggatagtcacagaaaagttccatgttttttgtttttttacctgaaagttgacctggaaatttgtggtcctgatatcatttttttttactccacatttactggcttactcagaagtaataaaccaaccttatagtatttacactccttatttccactatagtattctattgagttggctatatgatttttcaaagatgtatcttcaattaggcattttattccaggtgactactggtaagtagcccctgaagaccatagaatttcccatttgccacttgatgtggcctggctctgtgtcccaaccaaatctcatcttgaattgttatccccatgtgttgagggagcgacctcatgggaggtgataagatcatgagggcagttctcccatgctgttctcaggataatgagtgagttctcacaagatctgatggttttataaggagctttccccacttcactttgcacttctctctcttgccactatgtgaagaaggaagtgtttgcttccccttctgctataattataagtttcctgaggcctcccaagtcatatgaaactgtgagtcgattaaacctcttccctttataaattacccagtcttgagtatgtctttattagcagtgtgagaacgaactaatatgccactggacagaggacagtattatctttatatctagtcatatcacagaacaaaatttagatttttatattcaaaactctctatttttggaattaattccagtatcaataactgtatcagtctaggtttggtcaaagaaacaaactaagctctgaattctgaacaaaaaatatttacatagaactgggagatggtggtacttttggaagagctgggttgagtgggaaagagcaagcattggtaaagatgctaccaaaagttggcgagcagctgcaggaaggtggagaaggtgacagtgaaaatctcttctgaagcagtggagtgagtgccttctacaggcatgtcaggaagccactatgaagctcatgtctgcacacacaactaatcactcttgcctccccccatttaccatattctggtacatttacattttccaagttttatgtgatgacaacttctaacctggaccacataggaaacaggactcaggaaacctagttttggctccaaatgtgtgtgataatggtggtaatgaattagcaacagaaaatcctgcataatataaaaaactgaaaaacagaaaatatattagaagtataaatacgttatttggaagcaatagctagatgctgtatatgattttctcagcagagtacaaatgggaagtagaatgggatgtggtgagatgctactatatgccttattagtcttaacgttattttatctttaaaacaataggcaagtattactttaatgtttagggcaatgatgctaagggaatatcatttttttcaggtaaattagaaatttttactatgcagatttaaaacattcctatgtagatttaaaataattctataactctttaaaataaatgcagcattctggttggagcattctagtttatttgctcaagctacctgttattctcaactaggccacaaagaatcataatgttttccaatggcttgtgggctaatacaggacacattgtatattggggacgttattcttcttctggtgaagtcatgaccaggacggacaactctgactccaggggtaaaatatccagtgccagtttcacctctaacatgatattgcctgcctgttcagttggctggataaagaaggataatttctgttttccatggcaagttctggaccttgtttcactgaatgttccagcagggcttacactgtttggatgaagatgaagtgttaaatacaactgtcagcctgaggttttgttggaaatcatagcagtgaggccttgactttatatgtagaagacacagaaagaactatacgtgaatttagtttagattcttaaatgataattgtcacaatttgaaaaaaaacttgtgtaaacattcttttggaagcggtaattttggaaaggaatttgttgagttttattgttgttgaaggcttgtttctacttattaacctaaagtggttcagtacagaaatcagtagctttccaaagaagcaggattgcataatttattaagcatatatgctgtaaaagtgcatagatgctctgggttcaggtccctgttcttttgccagcaaaatttccctcgaattgtttgagtgaatgattggtttctcctgctgtaaaatgaagttgatgacactcctacctcatggtattgtggggaggattcaaagaactgataatgcatgtaaattgcttaataaagtttctagtacataaaatattagctacgattatgaatgcgtacagattatttttcaaaatatattacacaaaagcatatttatacaatgtgagggagtatgtatgtgtgtatccatgagaccttaggaaatttaaaatcatgaaataacaatattgagactcatcttttggaatgctctgaggagtagatgagtaagggcactgtatgtttgttgaaaggaataaatgaaatcatgtaaataaaatctgttggtaatctttcagagattctaatacaatgtaaacagacgttgcagagttgcagttgatagaatcaatgcaatagcattctatcctcctctgcatgcttgcaacaccatgaagaatagtattgcagtcttgcccttggatgcctgggagagctatagcctgcaatggtttcagcatccttgtgccagaatgcactaatagaagaatgccagatgcatagagaacctcaaatgcaagttacctcttattattattattgtcattataatgggacaaaatatatgagaacaagagcaaatatcagagttctctcagataagtttgtttttaattgtactaataagaatgtgagacttgctcaaggtgagaaaagagatattccctgagtctgtactagaatgaaagactccaggttccaagtttgtttctgcactccaagttgatattaacctactatattcatttaccagagttgccataacaaaatatcgtagactgggtggcttaaagaacggaaatttattttctcacatttctggaagctagaagtccaagatcagggtgccagcaggactggtttctcctgaacctctctcctggcttgcagattggctgtcttcttgctgtgtcctcacatgacccctcctctgtgagcacatccttggtgtctcagtcatgttgacttaggcccccacctgtatgacattatttaaccttaattacctctttagaaagccaaatacaatcacattgggggttagtgtttcaacatatgaattttgagcgaacacaatgcagtccataacccctacttattacattattgttcttccaatattgttctaatgttgttcttttaggtttaaacttctgatggtcatgtttatatccagaactatgcctataggcacatatattaaatttaatcatctaatcttggtacttagcataaggggaccaggccaatctgccaaacagaataaacaaaaaatgttatttttagaacagttcaaaattttagttctattgtaaattatcagccttttgatttttttaattgacagaactgtgcatatttatggtgtacaatgtgtttttttaatacttatgcattgtggaatggctaaatcaaattaattagctagcatgttaattacctcacataccatattagttagttttcatgctgctgttaaagacatactctagactgggcaatttacaaaagaaacaggtttattggacttaacagttccacatggctggggaggactcacaatcatagtggaaggcaaattggaacaagttacattttacatggatggtggagggcaaagagagagagcttgtgcagagaaacgtctgttttaaaaccatcagatctcgtgagactcattcactatcatgagaaaagcatgggaaagacccatgcccatgattcaatcatctcccactgggtccctcccaaaacacatgggaattatgggagttacaagatgagatttgggtggggacacagagccaaaccataccacatatttatcttttttttgtgatgagaacatttaaattttactctgtcagcaaattttaagtatagaatacattgctattaactacagtcatcatagcaattgtgaatgggaattcattcatgatttggctctctgcatgcctattgtttgtgtatagaaatgtttgtgatttttgcatattgattttgtatcctgagactgctgaagttgcttatcagcttaagaaacttgtgggctgaaaagatgggattttctacatatagggtcatgtcatctgcaaataaagacaatttgacttcctctcttcctatttgaatacacttattactttctcttgcctgattgccctggtcagaatgtccaatactatgctgaataggagtggtgagagcactcctatcgtcttgtgccagttttcaaggggattgcttccagcttttgcccattcagtatgatattggctgtgagtctgtcataaatgactcttgttattttgaggtatgttcctttaatacctattttattgagagtttttaacatgaagagatgttgaattttatcaaaggccttttccgcgtctattgagataatcatgtactttttgtctttagttctgtttatgtaatgaattacgtttattttcagtatgttgaaccagccttgaatcccaggaatgaagctgagttgatcatggtggaatacagctgacaagggaagtgaaggacctctccaaggagatctgcaaaccactgctcaaggaaatcagagaatacacaagtgaatggaaaaatataccatgtttatggacaggaagaatcaatattgtgaaaatggccatattgcccaaaataatttatagattcaatgctattccccttaattgacattccattgacagtcttcacagaattagaaaaaaactcttttaaaattcatatggaaccagaaaagagcctgtatagccaagacaatcccaagcaaaaagaacaaagctggaggcatcatgctatctgacttcaaactatactacaaggctaaagtaaccaaaacaacatagcactggtacaaaaacagacacatagaccaatggaacagaatagaactcagaaataagatcacacatctacaaccacatgatcttctacaaatctgacataaacaagcaatgaggaaaggattccctatttaacaaatggtgctgggagaactggctagccatattcagaaaaattaaaactggaccccttccttacaccttatataaaaattaactcaagatgaattaacaacttaaatataaaacccaaaactataaaaaccctagaaggaaacttaggcaataccattcaggacataggcacaagcaaagatttcattatgaaaatgctgaaatcttgttgcaattgcaacaaaacaaaaattgacaaatgggatataattaaatgagcttctgcacagcaaaagaaactgtcactagagtgagcaacaacctacagaatgggggaaactttttgcaatctatccatctgacaaaggtctaatatccagaatctacaagaaatttaaacaaatttacaagaaaaaagcaaacaacctcattaaaaagtgggcaaaggacatgaacagacatttctcaaaagaagatattcatgcagccaacaaacatatgcagaaaagctcaacatcactgagcattagagaaattcaaatcaaaaccacaatgagataccatctcacgccagttagaatggcaatcattaaaaagtcaggagacaacaaatgctggtgaggctgcggagaaaaaggaacacttttacactgttggtgggaatgtaaattagatcaaccattgtgggagacagtgtggtgattcctcaaaaacctagaggcagaaataccatttgtcccagcaatgccattactataatacccaaaggaatataaatcattctatataaagatacctgcatgtgtatatgttcattgcagcactattcacaatagcaaaaacatgtaatcaacccgaatgcccgtcaatgatagactgggtaaagaaaatgtggtaaatatacaccatggaaaaccatgaaaccataaaaaggaacgagatgatgtcctttgcagggacatgagtggagctggaagccattatcctcagcaaactaatgcaggaatagaaaaccaaacaccgcatgttctcacttacaagtgggagctgaacaatgtgaacacatagacacagggaggggaacaacacacactggggcctgttgggagtagggggtgcagggacaggaagagcatcaggaaaaatagctaatgcatgctgggcttaatacctacgcgataggttgataagtgcagcaaaacatcacagcacatgtctacctatgtaacaaacctgcacatcctccacatgtgccctggaacttaaaattaaaaaacaaaaccaaaaaatcctagagttactatggtatacaatagagctcttgaacttcttcctgctaactgaaattttgtatcccttgaccagtatctccccaatcctcctatcctccaccctctggtaaccatcattctattttctgctgccatgagcttgactttttaagatttcacatataagcgatttcatgcagtatttgtctttttgattatgttactttaagttatgggatacatgtgcagaacatgcaggtttcttatataagtatagatgtgccatggtggcttgctgcacctatcaacctgtaatctaggttttaaaccccttattcattaggtatttatcctaatgctctctctccccttgaccccattccccaacaggccccagtgtgtgatgttcctctctctgtgtctatgtgttctcattgttcaactcccacttataagggagaacatgcagtgtttggttttctgttcctgtgttagtttgctgagaatgatggcttccagcttcatccatgtccctgaaaggacagtatttgtcttttttttttttttttgtctggctttcacctaacattatgtccaccggtttcctccatgttgttgtaaatgacaggatttccctcttttttatagagctgaatagtattttatcatgtctatgctccgtgatttcttttttttttttcttgagatgaagttttgctcttgtttcccaggctagagcacaatggcatgatctcagctcactgtaatctccacctcctgggttcaagcgattctcctgcctcagtctcctgagtagctgggattacaggtgcccaccatcatgcctggctaattttcatatatttagtagagacggggtttcaccatgttgaccaggcaggtcttgaacttctgacctcaggtgatccaccctcctcggcctcccaaagtgctcggattacaggtgtgagccactgtgcccggccccaccataatttatttatctatttattccttgatagacacttaggttgattccataggttggctattgcaaatactactgcaatgaacatgcgagtgcagatatctttcacacactaatttcctttggacatatacctagaaatggaattgctagatcgtatggtagttctatttttaatttttaatgaagctacataatgttttccataatgactctactaatgtatattctcaccaagagcatacaagagttccctttcctccacatcctcaccaacacctgttattttattgtctttttcataacagtcaccttcataggcatgacatgctatctcattgtggttttaatttgcatttttctgatgattagaaatgttgagaatattttcatatatatgttggccatttttatgcctttcgttaggaaaatgtccattcaggtcctttgtgcattttttcattgggttattctttttttcctattgagatgtttgaattccttatatattttggatagtaacttcttgtcagatgcatgttttgcaaatatattctcccatactgtagattgtctcttcattctgttgagtgtttcctttgtggtgcagaagctttttagtctgatattactccatttatctcttttctcttttgttgcatgtgcttttggagtcaaatcaaaagtagcgatctttttggtactcaagttagtatacattacaggctaaatggaaaaagtcattaattatattccttattatagaaagaagcctttatctgtaggacaaggtggctcacacctgtaaatctcagcaccttgggaggctgagacatgaggattgcttgagcccaggagtttgaaatcagcctgggcgatatagtgagaccctgtctctacaaataatttaaaaattagttgggcatggtgacacccacccacagtcccagctactcaggaggctgaggagggagaatcccttgagcccaggagtttgaggctttggtgacctatgatcacaccactgcactccagcctgggtgacagagcaaaaccctgtctctaaaaaataaaaaataaacatgaaaataaaaaagttttatctattcactagcagagaaaaatgcttctacttgttttctacattattcaaggttgacttttcaagtagagcctttattgcaaagggaaaaatccagatgacaacacgatctgcatgcctctagaagatataattgtgcgtagatatactgatcatagagatagagataagaatagaaacagggatagacatgtatatatatatatctgtgtatagtatagatttataatttttcatgtacaacaaaatattttattctcattcatgaacttacatgaaagtaagtccatctctgtttacaaacttttattcataatgtaagataagctacctacagagcctgccaagagcacaaaaattgcaagctcccttagaaagaaatacacatgaatgatctaattgctgagaaccacttctgagaatgaaagaacccagtaagcattttacatataaatttaacctaatcattttatatcattataaaacataaacattttatgttacaggtgaaacgtgtagagcttttgtgatttgaccagagctcgtgctttttggcagctaagccaggaaccagaggaggtatctggctccaaaggcaggtggagttccttcttccacaatgcttggctcttttttgcagaaatagaaaatggaaacccagagggatgagtgatttcatttaaattaaactaataaggaagtgccagaatgcttgacattcactgaatgagatagaattaattctccatacagactgctcagctctcagcacggctgttgatggttaactactatgatgaaaatgataagatattttctaataaaataaaaattgtttgcatttaccatatacacatctctagcaagctcatggccactccttggagggtgggaatatctgaggaccccccttgggggtttggaactatcagggagagagcctagtggatcagtgtgaacctagtgaaggccacagtaaaatgttaggtctgggaatcaattgttcttgatgaactgtaaattgtaaaggttgcagtcattgtgtagccagcaagcaagtggccactcaggtaagtgggggaacacatgtgaccattgcttataatgagcttctttatgttggctcgagttggattccatctaagctataaatcaacccttctctttcacatcatccaaatccattccattgaaaatgagactctggcagtgattagtaatttctgaagctggaaatgctgtcttgatttggctatggttggaaactctgaacattttcttttcttatatagagctgccagttggtacagttttccatttctccttagattcatctcatgccactatagtgtaaaatcaaaaccataattaagttctgaaatcccatacaatttagtgccattgatgctgatttctttaaatcagagaagacagatctctattgcctccatggacaatgagagggaaggaagaacactcgagaaatgttgatcatttaaagatacgtttcagcccttgggtttaactttccacagtaaaacattactcaaaaatgcagtttctgttttcttcccccccggtccccctgccaccatctctctaagccactagctctctggtgaaagtgctttgagattgtctcaagactgttaatagctggaagaagagttctagatcagctgaagatgaggagaagtgcgcatccacacagcaccagtcaggctcaaaacggatgcaacttcaccaactctactgctgtttactcctctgtacaagccaagtagtgtttaaatataaatgtaatgccaccattttatttattatttagacaaaagaaaccctgatgagatacttctaagcctgcacaggagtttgatagcaatccttgcttcagaataaaattaggataaaaaacttcctagaataacttaaaagtctcaactaacctccagcaacaggtttctaccacaagacagatgtttctatgaggaacactgatttgattaagtgttccacaatagagaaccttatttagcagtaccatctgcagccataattagtttgaactcatgaagagtttgacaggagatacattaatttctgggaaaagaggacttccttattttgcatggatgaaggcacagaaatttaatgaaaaggcattcacagaaattctgagggagcttgttgagagcttttaaaggtcaacataagaaggggaaaaaactggaacattaactttgggctgagagtcgagttagtgaggcagctgactgacttaacacttcttctaacataatttcttttccaattggaacaaaaatggatgttgtccatgcaagcccagaaactagagctgccctccttcttggacactgacacctgggtccccaagatgcagacagctgagcagtgcttcagagaacagctgacacagactggctgggtatccagcacttctcagatattaatcacccaggatcttgtaaaaagggagattctgattgttcggcagtgaggtggggctagagtatgcatttctaacaaggtgatgctggtccctacttcggttaggaatctagactcttagaggtagaagaacctggagtctcatccacacttctcctacccagctcccacatcaacaaaaagtaggcaagagggcacttttccctttcgtcaccatccttctccccattgtgcctttcctgccttggcctcactggatgtctgtgctatcctgggatggaagaggcagggcaacatgaaaggatcacagtggtgatttgtccaaggcctaaaacaatcctctgttggaattgtcacagcccatctcttattccttagaaagcagaaaacaaaatgtggcttttatgtgtctggagacattaaattttggttcttgggttgaatctcacatgacagaaatcactaggacaacactggcaaccactcctaggagaaatgtttgttcttctttcaatataaggcaatgaatttgatatctgttgttaaagtaaataattgcattacgggggacataacttcctttgtttttctttaaataatggctgaacttattatctaagatgtttatgtactacaaactgtttatgtagttgactttctattgaactgaaattcacaagatctggcttttgttctttgctcagtctagcatttactatgtgaactgggggcaaaacattgaaatttctggggccctgtttccctgttttacagtgtggagattcattacttaggtgccttctgaagatacaattctagagtcttaagctaatagtgattgaggagttaattaatattgagtaaattttaattctgctagtattgtatattttggaaaattacttagcttttggctcatttggtttccacatccatgccaaaagcttaattagcagcgtatgtagctcaatgtaaggacagttaattctagtcttatttcttgacaatttcattcttagtatgtcagaattcttcattttggggagaaatgtgcaaaggtagaaattacatagtgcagtcatctctgttaagaacttttatctttttaaaaaacatcagctttattgagatataatttacataccataccatcatactatttgcctttttaaagtatatcattcaatattttaaagtatatttacagggttgtacaactatcatcacactcaatatgagaatattccatcacctccaagccctctacccattagcagtcacttcccctgaattctccccatctctacccctagaaaaccactaatctcctttctgtgtctatagatttgcctgctctagacatttcatgtaaatggtgttatacagtatttgatctttcatgactgccttctttcccttaccatgatgtttttaatgttcatccatgttgtagcatctacccgtacttcattcctttttattgcaaaataacatttcattatatgaacgtatcacgttttagttatccatttatccattgatggacaatgaggttgtttccacttttgattattataaatagtgctgttatgaactgaatataaatgtttttgtgtggacatgtttttagttctcttggatagatacctaggagtgaaatttctgagtcatatcttaactctatgtttaatcgttcaagaaactctcagattgtttgccaaagcagctgccctacatcatacactcagtgtatgatggattcacgttcactgcatccctgccaacacttgttattgtgtctttctagtaatatcattctagtgagtacgaagtgttatctcactgtacttttgatgagcacttccctgatggctaatgatgttgagaatattctcatgtggttattggccatttttatatcttgtttagagtgatgtttattcaaatttgtacccattttcaaatcagtaaacatttgcctgtctatgattgagttgtaaggattctttgtattttctagatatgttatcagatacacaaattgcaaataatttctcctggattggatttttttttcactttcttgatgatgtcctttgaaacacaaaagtttttaattttgaagtccaagttatctatttttccttttgttgcttgtgcttttgatgccatatctaagaaactacctcaacaagatttatacctatgatgaactcctactcttgatagaaacacttaaaaaatctaaagagttcagagttccagacactggtataccaagcacacagttgataaacagtgtagtgcaattttgacggtgggacagcagcactcacttggggaattttcatatccataggccatatgacacttggtccattcctgtggtcacatcattatgctagattgcaaaaagacattaaagacataagggcttaattatttggggaaaatcttgtctctaaaggagtataagtcagctggaaaacatgctgagctcaaattcataaagtagggaccttgtgtgttatttctttgtgactgttccatacagaacaactttataacagtccttaatacttactgaatattttaaagaagtcaattaactgttgaacagcttggtgttcatttaatcctgtaccccctcttgaaatctcttagacttctgtaaagtgatacctattaattcagattaccagcattctgtcttatggtggtttctattacctggctcaaatgaaaacttaaaataaaaatcaaagttactttctatcttttaagcatttaaagctcttctgcctggttgcaaatgtatgctttcgtaccctctgagccaaaaatggattttctttactataaaaatgttatcataataaccttagagaagaaaatgaaatattcccttatttactaccttaatgaaatgtttcattttgcacattcctttccacattttgcttcatacatatgtagctttacacataacctcaatattattttcaaacagtattttagaatatgcctttccaacattctagtgcatggaaaggcttacatctacatgtataagaggattccagatttgcaaagtaactttgctcaaggcaacaatatcctatatttaaaaaatctaaagtgttcagagttccagacactggaataccaagcacacagttgataaatagtgtagcgcaattttgtgcttttttttttttttgagatagattcaaagtggaaaatgcatctgatgactgcattttcccttggggttgcatgattttacacacctttaggctgttaactctgccttcacactcatctttctgccctcctgcccattcacaaacagagagtgtcctggccacatccttttgggctatgtgatttggcttctgggtacttcttaggtttcttcccatacccctctccacctgctagatctgatctggacacaatggccttgattgttctcttagagctttccattcactgacccttccattagggacactctgtgcctggaccttgcacatttggcttcttcttaaacttaatggctcagccaaatgccacttcagggagaacttcgctgatcaccctgattgaaatttcctctccctcctcctgccacatcacattactccatcttattttcttcttagagctgactatagtctatgagaatctgtagtgtaaaattgatatgttcacagattatttgttcgttttctgtttcccctctgctgacaaatggatacctcatgaagcaggaattctgtctttttctccattataaactggacttattaccacacatggcacaataggcattccataaatgtttactgaataaatgaagaaataaaattttataaataagcaaagcattttttttccacactagtgtcctttcttcctcgctttctattctgagctgaatgggagcagaatatttctatttttacatttttgatagttatgagaaaacatcaaaaaaataaagcactgaaaatacatagatggcaaaaattattatagataagattacatgcataatttctttgcagaaaagctctggtattaaacaaaactgaagaacatttccctgacaaacattttttcaatgactttaatcattcaatactacagcataataacaacttccttgattgatggatagtgtgccccaatactgcttgtgataaatataatataatataattaatgtaatatcatattctgttttgatatcacttggtgcatttctgactgtatttaagcttagagaaaatttgctagtggtaaggaggaaaaagaagagtctcttgtactttgattgtaaactggacaacataaatggatgaagatgaattctgactgggtttataagaaactgaagttctaagggtaaagttagatggctattgtctctgaaaactttaggtgaagaacctcttttttttgaggttgggtatcctgaaaaactgaattgtcacttctgtgcttaattaaacctgaaactgcaaagataaaaatgtgttgtcatcctagatcaactaaatctgtcagaaaaaaagtacaaaataaataaaaaatggaagaaaatgtctggcctgatcaaataaactgaaaaaagaagagctggaagtaaaatgatttttcttcaaagaatgggctccctttttttctccaatggggacacaattgccctttgaacaaagtaatcatctgggcattcacctcaggcgtctcttctagcacagaatattattcccttatgctcctctaaagcatttccccctgttctattcagtttcttacctgggatgaggaacacattctgcaagtgtccgtttcatctataatatcaaagcagggaaacctttgcaacaggaaacaccctgctgagatcgaataataaagttgcaaattataggtttggatgctaggccctgtctctcagcctttgtgaatctccacctttatcaaggtggcagctggggatcatgtaacaatttaactggatgtgagagggctggagagagctgtgaaaggccagaggagagaaaggtgtaccatcatgaggacacatagagtagagaaggtataacactgggagacagcatagaggggagaagggtgtgccaacaggaggcgacaaaaaggggagaagatgtatcattaagaggcaacatggagaggcgaaggtttacaatcaagaggcaacacagaggaaagaaggtgtgacatcaagagccaacataaaggggagagggtgtgtcaagaagaggcaatatagaggggaagaaggtatgtcataaagaggcaatatggaggggagaatttgtgccatcaagataaaacatggtggggagaggatgtgacaatcaagaagaagcacagagaggagagggtgtgccatcaagactcaacacagaggagaaagtgtggaccaccaagaggtaacatggagggcagaagggtgtgccatcgagagacaacctggagtggagagggtgtaacatcaagaagcaacatttaaaaaaaaagaaaagtgtaccatcaagaaacaacagggaaagaagtagtgcataccttaaagaggcaacataaaggcaaaagagtgtgtcaacaagagacaacatagaaaagaaaagggtgtaccgtcaagaggcaacatgaaggggagaatggtgtgccaacaagagggaacatggaggggagagagtagatcgtcacgaggtaattaggaagggagaagtgtgtgccattaacaggcaacatggaggtgagggtgagtaccatccagaggcaacatagagaagtgtgtaccactagaggcaacttagaggagagctggtgtaccacgagagacaagatgaaagggagaagtttgtaccatcaagaggaaacatggagagaggagagcataccatcaggaggcaacatggaaaagagtgactgtaccatcacgaggaacatggatgggaaaagatgcaccatcaagaggcaagatggaagggaaaaggatctaccattgagagataacacggaggggacattgtgtaccatcaagagataacatggagcagagcagatgtgccatcatcaagaggcataatggaggagaaaaggatgttccatcaagaggcaacatagaagggagaaggctgtatcatcaataggcaccatagaaggcagaagagggtaccatcaagaggcaacaccaagaatagaagggtgtttcatcgacatgaaggggaaaaggtgcaacattaagagacaatacagaggggagagggtgtaccatcgagaggcaacatgggaagagaagttgtgccatcaagaggcaacagggagggaaaaaggtgtaccatcaagaggcaacacggaggagatagggtgtatcattaagaagaacgtggagagaggaacatgtaacatcaagatgcaacacagagggaagaaagatgtaccataaagaggcaacacggaggggagaaaagtgttgcattaagagataacatggactgcagagggtgtgccatcctgtggcaacatagtgagaagaagggtttatcatcaacaggcaagacggagaggagaagggtatgccatcaagaggcaacaaagcaaagagaacatggcttaaataggcaactggcaagggagagggtataccaacaagaggcaacacagagaaaagtataccaccaagagacaacagggaggggatagtgtgtgccgtgaagaggcaacatggagtgggggatgttgtggcatcattaataggaaacatggtggagagaggttgtgtaatcaagaggaaatatggtggggagagattgcgttatcaagaggcaatgaggaagggaaaagtgtgtaccattaggaggtgtattcatccattctcacactgctataaagacatatccaagactgggtaatttataaaggaaagggttttaattgacttagttctgcatggctggggaggcctcaggaaacttacaatcatggtggagggtgagagagaagcaaaggcctgtcttacatggtggcaggcgagagagagtggtgagcaaagcagggagagccccttataaagtgccatcagatctcatgagaactcactcagtatcatgagaacagcatgggggaaactgcccccatgatccaatcacctcctaccaggcctctcccttgacaagtggggattacaattctagaagagatttggatagggacacaaagccaaaccatatcaggaggcaacatagacgggaaagggttgcacatctagaggcaacaaaaggggagattgtataacataaagagaggcaacatagtagaagagtgtatcataaacaggcaacatggaggaaagaaggatgtgctattaagaggccgcctggaggggagaagggtgtccatcaggagccaatatgaaggagggggtgtatgatcaagagtcagcatggaggcaagagattgtgccattagagacaacatggaggtgagaagggcctaccacgagtaggcaacatgaaagagacaaagttgtatcatcaagaggcaacatggagaggataaggtgtaccatcaaggaggcaaaaaagagaggaaagcatttactatcaagaggcaatatggaggttagagggcgtaccaacaagaggcaacatggagaagagaagggtgtgccatcaagaggcaactgggaaatgaaggaatggcgtaatcaggcaacaggcaaagagattgtaccattaagaggcaacatggagaagagaaggttataccaccaagaggcaaccaagagggaatagtgtgtgccacaaagaggtgacacagagcggggaatgttgtggcatcaacaggcaacatgaagaggagagttgatgtcattatgaggcaatatagagggaagaggtgtgtaccctcaagaggctacatgaagatgagagggttgtatcaagagaggctacaagaaagagagaagggtgttccaagaagagttaacatataggagtgagggtgtgccatcaagaggaaccatggaggggagaatttataccaccaaaaggcaacacagaggggagtaggtgtaccaccaaaagggaacacaaaaggaagagagtatgccacaagaggcaacatggagcagagagggtgtgccacgaagaggcaatgtggaggggagaatcgtgtgccatcaagaggaaaaatggaagggggaagatatgccatcaggaagcaaaagggagaaggaagattgtaccgttagagacaacataaagatgagaagagtgtaccatgaataggcaacatggaagggagaagggcatatcatcaagaggcaagatggaggagatgatgtgtacaatcaagagacaacatagacagaagaggttttgacatcaaaaggcaacatgagatagagcgtgtgccatcaagaagcaacctggaagggagaaaggtgtcccaattaaaaaaaaaaaagaaacatagaaggaagaagagtgtgccatcaagaggtaacatgtgggggagagggcatgtcataaagaggcaacaaggaaaggaaagggttcccacctggaaacaacacagaaaagcgagggggtgtgagataaagaggaaacatggaaaggaaaaggccatgcagaggcaagaaagagatgagagggtgttccatgacaaggcaaggcaaagggtagaatgtgtaccctcaagaagcaatacggatgaaagagggcatgccaatgagagacaacatggaggggagaagttttaccatgaagaagcaacatggagggtgaaccatcaagagacaacaggaagaaaacagtatgtgccaacaagaggtaatgggaggggaagagtgtgtgccatcaagaggcaacatgaaatacagagggtgtgccactgaggggcaacatggagggtagagggtgtgacatcaataggaaacatgaaggagaaaagggtgtaccatcagaaggcaccaaggaggagagattctgtgccatcagaggcaacacacaagggaaaagggtgtagtatcaaaagaaaacattgaggggagaagggtacacctcaatgtacccttagcaataggaagcgaagagagtctaccatcaggaggcaacatggagaagacaggctgtgccatgaagagtcaacacggagcagagagggtgtatcattaaaagaccacacaaaaggtagaagtatgtatcatgaagaggcaacaggaggggaaagatgaagggtgtatcaccaagaggcaacatggtgagaagaagggtgagaaaccaggaggcaatacggaagaaagaatggtttgcatccacatggagagtgtaccatttagaggtaacagggagaggagagggtgtgccatcaagaggcaacatggaggtgtttcaaacctatgcatcttgttataaatatatctttgctcacatgaattttacttgtaaattagcatgcatggtaggaatgtaacaagagagaaaatggaagaagaataagggagaggccgggcgcggtggctcacgcctgtaatcccagcactttgggaggccgaggcgggcggatcacgaggtcaggagatcgagaccatcccggctaaaacggtgaaaccccgtctctactaaaaatacaaaaaattagccgggcgtagtggcgggcgcctgtagtcccagctactcgggaggctgaggcaggagaatggcgtgaacccgggaggcggagcttgcagtgagccgagatcccgccactgcactccagcctgggcgacagagcgagactccgtctcaaaaaaaaaaaaaaaaaaaaaaaaagaagaataagggagaataagaaagagctatgatgtgggcattggaagactgaaatattccatttttataagagtcatttatttacaaacctgtgtatgatcacaggggcatagttatgaaatagcatagttatgtcacagttatgaccctaaaattctgtatattagcgtaaatcttaaaatacaataataataattaactttatgaattgttcattatataacaaatactattttaattgattaacttgtatcatgcaattttttcctcaaaatctccttatcaagtatgacttactattatcttcattttctagatgagtacagtgagtctggagtagatgatgaatttactcaaagaagtctctggaaagagactgttgcagctatgagtctattagaagatataaaacatttttatatgcaagaaatttaacattgatgaagtaatactatatagtatacaggccatctagacaagaggtgaattctggggactgagtaaaataatcctttaaattggttaggcattacatttctttttctgtcttgtttggctatattataaagggttgtttcttaaaatgcatctaaatggaaaaagtacttatctagttttttttttctttctttattggtcgggggaagaattatgcttgttaaaaaaaaaataggcactaagaataaccagtgcctggtcacattcattcaagagaaaattgaatagctcttccttgtagggagaaaaacatcagcaccatcagcagaattttcctagtggtcctaatccagtgaccttgaggaataagtgattcatacattcatttattcatcaaataatgtttggacaactattatttattagaccctctgctaagtagtaggaataaagtgatgaataagataatagatattgtcatagtccatttccttaaagagctccgttccctgaggtggtagacttgaaaggagagaataacactatatgctggcaggtgttgtcaaggatatgctatgggaaattgaaaggagattgatgaacatttgactttaccaagagagtcagggtgggagtgagaggcagagggcatttcagacagtcaacacggggtggggaaaaagtttgaagataaaccaagtaaaatgactaaatgttgattagaaagagctcagggtgggtttggaggtgactcatccattcctgacattaaagatgacattatggagcctcatctataaatacgtttttatatcacaaactctatttaagacatatttccttccaatattctctatcacacaaagaaaccctaaaacaaaaaacaaaaacaaaaacagaaactagaaacaacctgtaacagctccttctcttccccatataccctttggctattatatgctgcattcagcaagggcttactatgaatcaggcacagtgctagacactctcattcattattgtatgtatctttggaaaacctctttggggtggtttcattgtgatgactgtctcaccaatgatgagaagataaatgttcaaagatgcctagttaataaatgggacaactggcactcacaactacatctcttttatgctgaagcctgtgttctaaaatccacgcttttctgcccccattaagaggataagccttttgtgatgtcttcctctttcagtctatctttgtgaaaatgcaaatagctgattattataggtgaacaatttcacagctgaatggacagcctgagtgttgatgcctgaggagagcaacagattctcttcttttaataataaacatggtgattatttgcacccaattttacctggctaaaatatgagaaggtgatccacagtgtaaatatctttgcacagcacactcccattgaggaagaagggtcttagtgcccaccagtcctcttctccaacaagcagacacaacatgacaattctcgtcttatgttacatgcccagtgttcttcattatctgatagatatcttctattattcttttatggaaaaatatagataggtagatgcagatatattttctattattttatagtatcttctattaattgatagatttatgtcagagattcaaataggaatgattctcttactttttgcaattcaaaacctcaaaaaatattaagggtttgaggtcagaaaattagcacagaaaaaaaaatctattataaagatacatgcagacgtatgttcattgcagcactattcacaatagcaaagacatggaatcaacctaaatgcccatcagtgatagactggataaagaaaatgtggtacatatgcaccatagaatactatgtagccataaaaaacaatgaggtcatgtcctttgcagggacatggatggagctggaggccattatccttagcaaactaacacaagaacagaaaaccaaataccacatgttctcacttataagtgggagctaaatgatgagaacacatggacacaaagaggggaacaacataaactggggtattttggagggtgggaagtgggaggagtgagaggatcaggaaaaacaactaatgagtactaggcttaatacctgggtgatgaaataatctgtacgacaaaccctcatgacacatgtttatccatgtaacaaacctgcacttgtacctctgaacttaaacaagctaaaagaaaaaggatatttgatgtctggttccagatcttcaattaactagctctgtaatactacgtgatcttttagaacatccgtctccaaatctatgatgtggaaaatgcacaatttcaaaaatcttttccatgtccagaatactgtaactctgaggattaggtggtttccattcccatgctggggaaatgtaactcataagcttttttgtataatagttctagtcaaccagctgttcactcccttcttcaagcttggccagagtggaatgagttgctagtctcataaatgcccgaaagaaggagaaacaagacagatgagttttgatgagtaagaactgagctaaataatccacagtctaagtgggttctggagcaagtgttctggtggtcaagaggcagaatgaggacaatggggaaataattaatttctgcatttaatgactctgtgtcaggctgatcctaaagtgtctatggagaaaattgcagtgcttccttgaatagccagataggcaataactggatgtatttatgcacctatggagatataagaaaataaaaggaaaattcaatttatttgaaatagttaaggctctcattttatgaaagggaggaaaagaaggtatccttaggtgtcccagtcatatcccaaagagaggggtatttattatgagtcaaggcagaattttctatgtttagactttggggggaaaaagcaatgtatagatgagcctactttctgtcatggtgatatatattacaaattgcaaaagttgatgggagcagttatatagaagttataattgacttgagccagtcaacataaagctccagcttctacttccacctatataattacttgataaatttcaggctccttgcacagtcttagggccataaacaagtattgaatgcagtctcattcacagcagagcccacaaactgggtttatctcccctgcgtaaaaaatgttaagtgtgttttcttggtacatacaaaggcataatttagcagccggagaatgcataaaactcatgctactggcagatgcttaagcaattcacaaatagtatcacaaatccttcattacacttcagcctttgcattaagacaggatcttgttattttgcaatgtttttagaaagagattaccatttccaagttaagctttaaggagtatattggtcgatcatttggattagagttcacattcagggaaatgagaattactatgttacagacactagagaaaaacaaaaagcattggtaaaactagcaaattgcacattaccataggtaaatgatttcactcagttgaatggacagcctgagtgtcgatgctttgtgagagcaataaattctccctttccattttatagaacgccttggtaaacaggcatttaaaattgtgtatttgtatatgccagctataagtatttaatctctttcttcgatattatttgaggtttacagcataggaaataacatcaaaatgaatattatagagacagaaagtgataatggaaaaggaaacttcaaatgtgtcaacctaagaattaaaggaattagtgtgatcaatttccagttggtcactgagatttttggttgggcacaagtgtttactcactgtctactctagacccagctctgtgtgggctgtgtctggagggcgctggggaaaaggaaagttacaatgctgctaacagtcttttggctgaagctttcttgtgttgcctatgtacaaagagtcagccatttcactctttataagcacttccattacaaagtgagtgagtgtttacagtaaaccatatactgcactaagcactaaacgtgttattctggaaagaagattaattcattttcctcattaggtaatatatgacatggcacaacattcaaaagacacaaagtggtatgcagtgaaatttctcccttgctaccatgtgcctcagctacccagttatttccacaagtaccagtttcttaagtacactttcagggataatctatgtatatgcaaatatatacaaatgtgtgtatatcatcctttaattagtaaattactgtttagttattattggtgggattctgtacacttattcctcaccttgcctttttcattgaatttacatcctgaaagtgtcccatatcagtacctggaaaactgcttcattctcattatgatgctcattattatactatggtgagacagcaccgtatcgtggtcaattctatgatcttggaatcagattcccctgggttttaatactaatcttggcatttactatctgtttcatcttcaacatgctgctgaactttgtgactcatatgtacatgggataatagtactatcgttgggaaactgtgtgagataatacatgtaaagcacttaggatgctgtatggtatgaccaaccactagatatgtgtttgctgtcttcatggtaatttttatattaaattgatgcaatgaaattaattcaactatgttcccactattagatgtataagattttcaactccattgcaattactatattgtaatcaatatccttgtatgtccattaccactggcacttgcatgtggatatctgtggaatggatttgacttggatttacacactcaaaaatgtaaaattttagttttaataagaaattttatacttcacacaactaggtaccaatggttcataataattcacctccactaacagtatacgaaagtacctactccttcgattgcagccaacatacagttttatcttttttttatctattacatacacttttatctttcaaaaccactatctcattgtaatcttaatatcctcttaaaaaattaaaagggatcctggtagagttccatttccactagtagtagcatagctcatatcagaccaagctttccatagatggcaataataaactctgggcaaaataattagacaatctgtagaaacattgttactatctgtatgtcctggagtgtaacaaaagcaggaagaaactggaagtgagtggacactcagaagaaaagaatgacacagctaaaaaggcgaggagaaaaaccctggaaagcagagattcaaaattggaaagccctaaattttggatgtaagttattcttacatctttgaatataagaatgtatctttgaattacacaatcgtggggaagactccaagcacaccaattaaggctaaaagaagtgaaaaaagatgtttgactgaactccaacacaaggaaaacagagtgtggaacttgagtttaaacaaattaacttcctacttgtccacaaaatcagctctcttaagaggaacacaacagaattcatagtctctacaatctttactttaaaatgtataggagtgaatgcaaaattactagacatatgaagaaaaaggagggtgtgacacatactgaagaggaaatcagctgagatcaactccaggatgatccagatattgaaataagcagataagattgtaaaatagctgttataatgatgttcaaggacctgtaagaaaatatattcataataaataagcaaatgggatcaggaaaatttaaactatgtggtcataaagcacttacattttacttgaagtgttgtgatattcactctaaatagattgtgaaaagttaacacagtactgtaatctcccaattaactaccaaaaataagcaaaaaatctaatagagatattaatacagaattttaagagatactcaacccaaaagaaggctaaaaagagacagaactaaaaaaggacatataggataaacagaaagtgaataataaaatggcatacctttattcaatgataattaacattacatgcaaatgaacttcatactccaattagaaggcagtttatcagactcaataaaaataaaaaatcaagatgcaggtatatgtgatccagaggaaatacactttatcatgacacagatagattcactttaaatagggagagaaaaatatatcctgaaaatacttataagaaagctggaatgtctgtattaatgttagataaagtagacttactgataaagagttttatcaaaaccaagaaggaacattttatactaataaatggtagatcctcagtaatacatagcaattatgaatatgtgtgtgtctgataatagagtttcaacatttatgaagtatgtattgacagaatttaaatgaattaaaatctccgtgtctctttgtataaatctgctgctatagttgaagctttcaacaactctctcttagtaattgatgaaacagccaggtaaaacattagcaagaacataagccatcttaaaaaccctataaatcaactcgaagtaagtagaagaaagaaaataataaagacaagagcaataattaatgaaataaaaaagtgaggttgagcattttttcaacatgtgtaagagtcatttgcactttgtttttaatgctaaccaccaaaataaccaccattttttgattaccaaaaataagcaaaaatctaatagagagattaaaacagaattttaagagatactcaacccaaaagaaggctaaaaagagacagaagaacaaaaaaggatgtatggaataaacagaaaatgaataacaaaatggcatacctttattcaatcatagtcatttgaatttcttattgatttgtaatgatgtgttctaaagactgtggtttatgtgctttttaaaatatttttaaatatttgcctctgtttatgattatttttgttcatgcatgcattatggagtttatatactcaaaataattagcttttccataaatagtttctggatttagtgattgattgagaaagtctttttctgcactgtatacacattcgtgattctatggctttacttgttgaaattaatttttttacccatttgacttttattggagagggatatagtgatttagtatttgttatctctagatggctacccgattgcctcattaccatttattgagtaatccagatccagattttattttaggatattcatcataatatgaatatgaatgatgtgaatatcctaaaataaaatccctgttgtatttgggtctatttacatactctttctttgatctatctatccatgcacagtaagactctatagtaattaattagcctttataccagggctggtgtcacctcattaccctcttctttcaggtgttgattcctcttgcttgtgatttttctatattaacttcagaatctgcttgattattttttaaaatccccagtcactctatttggaaggttgtaactttgtgaagtaacttaggaaaaaattatcgaataatgtcattgagttttagctaagattatggtgtattttcaatggtttttcagtcttttgggtacctcactaatgctttaaagtttttcttaatatggattttgcacatttctgataatacttggctttggtaatttattttatcttttgtagctgttctattaaactacctgattcttattacatatgacatatatgtaagttcagatactgatatagtttggatctgtgcccccatccaaatctcatgtaaaattgtaaccccaacactgggggatttcaacactgggggccagatgggagaggattggatcaagggagtgtatccttcatgaatagttaggaccatccctttggtactcttctcctgatagagttctaacgagatctggttatttaaaagtatatgttatggccaggcacggtggctcatgcctgtaatcccaccactttgggaggccaaggtgggcggatcacctgaggtcgggagtttgagaccagcctgaccaccatggagaaaccccgtctctactaaaaatacaaaataagccgggctaggtggcacacgcctgtaatcccagctacttggggggctgaggcaggagaatcgcttgtacccaggaagtggaggttgtggtgagtcgaaatggcaccattgcactccagcctgggcaacaggagtgaaactcagtctcaaaaaaaaaaaaaaacaaggaaaaagaaaaacgtatacagcaccttcttcctgttctggccatataagatgtgcctgcttccccttcaccttctgccatgattggaagtttcctgaggccttcccagaagcacaagctgctatgcttcctgtacagcctacaggacatgagccaattaaacctctattctttataaatttcctagtttcaggtatttccttatagcaatgtgagaatggactaatatagatacagatacatagatacagatatagaaagtaccagggcattttactgattccttttattatttgtaattgtttcctaatggagtctcttgagttttctgggtaaaccaataatatcatctgcacataatgacacatgtatttccatcctttacaattttcatacctcatttatttttcttttgataatggacattttattttttaaaaataaatctttcactgcttcctatttagcataattctgggccagtttgataaagacatattaaagatttatatttctattactatgttttaaacacttttttcataaataatggatgttaaaattttcactattgaaccattaatatactgaattatgctaatggatttctaacattgagccatacttacattactgaataaagaccaccaggttattgtgtattattctcttaaagtgctgctgaattttgattactaattctgttgtggatttttgtgtagattttcataagaaagaactaggattattgtgatgccttactgtattttgttatcaatgttacattatatttataaaaataattttttaaatgttcccccttatattctagaacagaggttgacaaactgctgcctgctgccaaaatataataaataaataaaaataaagttttaataaataaaattttattggaacacaacacaccacatccattaatttatatattatctgtggctgttttcattgcatggacatagagttgagtagattcaatagagaccgggtagcccacaaagccctttagagaaaaggtttgcagactcccacttggaataatttaagtagcattggaattgttggttaattaaggtttggtaagattccatgtgaaacaatctcaggctcgttattaattccccatgtaggcttttctttctgttcatgagtttattgcaaacattattttacaatttcatattcattgcagttctctttgtgatctaatatattctgaatgttccaagggtctttgaaaaaatatgtgtattttctatttgtgaagtatagtttttttatatgcatattagcttgatttatattattgttaattaaatctcctttatctttacttgtgtttttccactgataatctttcacagaaaagaagagatgaaatataacctgtcagttttctttgtattttctttcaactttatttttaagtattggttatatattatttggttgatatatgttgtacagtcgtttggcaataaagtgttcacattttatttattaattccctttatcctaaattcagtcttgtctgatatgaaagttacttctcttgctttcattggtcttgtattttcaggagttattttgaatactcttttactttcaatttttttgttgtaattttgtttcagtatgcgtcctacatataacaaaatgttgaatgtaacattgattctttgattcttgaatataaaatagttttatcttgtgattcaatgagatgttttatttatttaaatatgtgattttaattagcttacaattatgatatgagaggtttgtttagttgtagaagcatattttattctaagctttctgatttgattgcatttggagttcttgtatcagtctttttgtagtgtgcatagtctttgatttggtttgcgtgcatgtattccttccaataatttggagagcttgactttttacattagcaataattttcataattctactattatataataaaagtcatcttttattataatcaatcattaaaataattatatttctgattcatcctcattctttcaaccaattgattttaataattactgttatttaccttagtgattacttttatacttttaattagagttatgttagtttatcaatttaaaatcatgtcatttccctatcactatagaaggtgaagacattagtgatgtcttttcctttatttttaatcttttcagttatcttatttgtatattattaaagtagatatttgtattctgttactaaacctctgagtgcacatatgtttatttattgtttaataagtgtcaggcactgttctaagtcctcataaaatttctgtgaagtgggtattattattatcccactatacaattcacagaaattttataaggacttagaacagtgcctgacacttattaaacactgactaaatattagctttttgttattattttatcgttaatcacattccttacatttattttagtcttattcatagtgctaaatgagttcaatggcattccatttatctttaggttggataaaggaagttctttagtttctttagaaggactcatagaaatcatattttttgatgtgttgcatatctaaagcatattagtctgttgcttttatacttgagtggtgccttggatagacatcagcttccttaaggactctgtgaatgctgtttactgccttgtctgatttaatgttgctgagaggaaattttaagtcagcgtgatatttttcatctgagaggtaacttgatcacttagcctttatgctccacaaaatctgaatttgttacataaatttagtctaattgatgtatgtttttaagtaaattggaatgttttcttgaattttatctttcttaaatatatttggttttattattttggtcctctctgttaaggataccaattaactatctgtcagattatctttgcattacttttacagctaccatttttctctttactttcagctttcttcatttcaattttattttgcttattgcttttcataatccatgctatcaaattattcattaagtgtttagcagtgtttattttcctctgttgctttcaatgacatttgtttctgagatggctttctgtttcatatgtctgctttaagctcttgttctaagacagcatttagttcatgactttcgtttattaagtttttataggttggggtgatatctttgtaacaatttagattatttccatttttacattgtttagaattttctatttgtcactttccattcttttattcccttggttgagggcatgtaatatcttctgtttaggtgagggtaattttttgatcattgcacatatctgaataagttaaattccttctagacttactatttttaggaggctgtggctatgtgagagtgaatttatcttagcactattttttctaatcaaactggtagcaacagcgttactcataatgcagagtgtgtctcctcccacttcctcattggcagattgcatcctgcaagcatggcgtatgagcagtgtttcttactgcctcacgtttttttcatcattgttgtatcagcaagggtttgggacagcttcactacaaccctgctctcctttcattcagagtggagacttgttggttttgccttgtgagctgtctccaaatgtgcacttgatgccctcttggcttcttcctgcaacctgtgtgacctttacttcatctgactgccttttcctcattttgttatttggtataaaagatgtttcttggtgtcttaggacttgagtctatgtactgattttgttctcctggacatctggtcaatgccatctttaccaccatggtaaaatcacaagagtaatatttttgttgttactcatcagtaattctggaaaccaattttgatgttggcaaatgacacttttgaaagcaatattttctttttttctatcagtataagcagccaagtcccatcagtttccctagtcacgtaatacatggaataaaagaattgtctcattaatcattaaacaatcagctctagttccatattctgtttcttcctgtcactgggcctctgccagaggagataccacctcctctgtccttttccttactgaaccagctatttatatcctacatgcaatatttataagataaaatgtcagtggatcttgatctagctcatcctttaaggaaatgtgaccaaagactggacaaatagcttctcaggcccaatcatgcctggaggtcagccttgtctgggatgcacgtccaccctcctccttctccagagcttccctagctctcatagctcagcaaacatcctgtctttttataaagacttctctaacttccaagcacacagagcactctctcttttctgaattcctgaattccttcttaccgtccttctttatggtggtatgttgtgggggttaaaaatatgtctctggagacagatggctttcataggagcctcagttctgtgagacaccaactgggtaacctttacagctcagcttctctcagtgcttcaatgtcctaatctagatagaagacacttatgcctaatttttcttatttttaaaatgggtaacactagtagaatttacttcatagtgctttaaaattatattttaaataatatatttcaattaattttataaaataacatatataaattaattttaaataattgaattaatttaaatatattgacaaatgatgctagaacattataagcattatatgtgtttactgtcattcacaaatacatataattcaacaaggatgtatttagtacttaatatacactaaatattttgctatgtgcttcagccactgctttgtcttagggtgacaggaggtgccaattttttttttaacaaattgtaccatgtatttttttacaaagttttttaggtactttttttatacaaaaaactggacatatataaggagttcaatttgatttgtactggcagatgaatactctcataaacagtcaccatgatcaacatgacaaatattcccatcaccctaaaacatttccttgagtccttttgccatctgtccttttctccacatgcatctctctgcaatgacttatctgctttctgtccttgtggattagtttgcattttctagaaactatataaatttgcattttctagaaaccatataaatagaattatgcagttcatttttgtgtcttttatttttacaacaactaggagatccatcaaaattgttgtgtgcatcaatagtttgtccttcttattacttattaatatccagttgtttggttttatcacagtttgcttgtccagtgaattgctgatgaacatcggatcattttcagtgtttggatattactgatttagctattaatgagattccttgtacaagacatttctactgctgtgaaccccccggtcatatggttaagtatatatttaattttttatgaaatagcctgtcttttgcctccccagttttcctgtgcccatattcctcttcctcatatagcttataattgcaaaaatattttgaatggaattccaggtataagaaaaagcatgtttctgtggagcacagtcatgaaaatagttagcagtttctcaacatatgtcaggtcaaaattcaagtaaatgatgataaactctataagtgccagtgacctgtctctacttatccacaattagagcctacctcctttaggtagtatctggaacaggagaggctcattgttatagactgaatgtttgcatctccccaaaattcatatgttgaaatcctaacccccagtgtgaagatttaggaggtaagaacctcgggaggtaactggatcataagagtagagcccttataattaaactggattcatgcccactgaaggaattctatgaggagaccccagagacctctcttgctctctttccaccatctgaggacacgatgagaagccatcagtctgcaacacgaagagagccctccagaatcccaccaatgctagcaccctgatccccaacttttagcttccagaactgtgggaaattagtttcggttcttttgtttgtttgtctggttggttttgttttgtttttgagacagtcttgctctgtcacccaggctggagtgcagtggcacgatctcagcttactgcaacctctgccctgtaggttcaagctattctcctgcctcagcctcctgagtagctgggattacaggtgcatgccccaatgcctggctaatttttgtatttttagaagagacaaggttagaccatgttggttaggctggtctcatactcctgatctcaagtgatctacctgcctcggcctcccaaagtgctgggactacgggcataagccacctcacccagccctgttctttataagccacccagtctatgatactttgttatcacatcccgaactaagacattcactgtaagcattttttgaatgaatgtttgaaagaatggatgtttgaatgtttaaatgaatatttattttgaaatcaacctgtgttaccatgaaatttttcaataaataaatagacctgaaacttgctttaaaaaaataaatttaataatgatgtatttgtatgtcttgtctcagcagatggcagtggcctaagtaaatgtggttcttatttgatttgccatagttctgtgttgtatttgattatttgggttctatgtacatgtttctcaaactccacaactagaatataattttcttatttttgtccacgatgcactaaacatacatccatgaatgttgtaggtctatgttgtacgtttgccaaccgattgactgatactatctatgactggagggactatttgacattcatttactcaacacttatttattgagtgtttactatattccaggtactattttagggaatgtagactatcagtgaaaaattcagacaaaaatttctgcctttagggagtttaaagtttatttgacggtagcaggcaataaatgaaacatcaagtatgtgactggacaacaagggtgacggcaaaaaataaagtaggagcccatggttcctaggaagcaagccacctagatactggaagagcactgcagagaagcagcatgtgcaaaggggttgaggtgagagactctctggcaggaagaatcttgagtaaaccaaggaggccagtgtgactgaagttgaatgagtggcaaggtagtaggagctgaggtcagcaaaatcctaggggatgaagtcaggtcttcttggtcagtgcaaatagattgagcttcattctatgtgagctggaaagactttggaagatgctgaatagaccagtgacataatctatcatgttttataagaatcactctgactggcaggtctatggtacactgtaggagggaaaggggctgcctggagaatctgttgggattcttattgcagtggtccaagggggaaatattggtagcttggatgtgggtggtatcagtagaggaggtgagaagtgtgagcaatcaggtgaaatttagagtacgtactgcttgagaggccttctagacattgggatggtgatgctgaatggctgttggatatacaaatctggagttcaagaggaaagtacagtatggaggtctaagttttagagtcagcatgtaaagatggtatttgggcttgggtgatgctatcaaagaaatgcaaagagaataccaaagtaattctatttaatctcccagtgttgtattctccctgaggtgccacaatgatcacatatgcactgtcctagctggataaaaataaagatgctgtgcacatccttataagcaattaggaagcattaaggttgattgtcacaaggaattaaagaggagaaggtaatggcagtgactggcttaaaggtcatgccacatgctcccatggaccaggtttggcctgcatgccatgagttacagctggtacttaccaattgtgagcccttgcaacatataatttaaattctgtgtgcctcagtttcctcaaaagtaaatggagaaaatacccaattggcagtattcttctaagtattaaacataacctggggcacacaccgaatatcttttctcattttctttgtctaaaacaaatctataatttttttggcaagtgagagttcctaaccctggtgagatactcattgtccctggctcccttgcagctaggagtatctatgccatctgtttcagccaatgagaaaaaaaaataggcatctactggaggcttaaggaaggctctttttgtttttcctgataatagagagaatagggctggtgttccctctttcttctctctcctttttctcctcacaagaacatggaaattgtgtttcaaactagaggagttccattgttaccatgagatgaggataaaagccaatacataaaacagttttgagaggaaagatgaaaagatcctgagttcccaatgctagatttttgcatgcctctggctttcttattttattaagtaaactagacttctctttgtttaagctaccataatttgggttttctattttttgcaatgaaacatattccaaattgtataaatacaatttatcaactatctgaggatgcttggcctatagtgaagtgctcaataattcattaattcatattttttacttggacatgtgtctcaaattgaattaattatagtttttattatacatgataatcattggtccatgtacatacctcttttatcttggttaattaatgttaaaaattattcagtaacatggaacttctttactctttgtattccttcttcatgggacacataatttctttgaggttcaaatcaattcaagtagcaagatcattgttcctttgattggtcaaagttttgatggcatcagtgaggacttgatttttagttgcaaattactcctactagaactggcttagtcaaatcaaggttgtgtcttatcagctcctgcctatgacggtgctaggggagtcagcagtggttgctggggctatacatgtattttgatttaaagggtacaactgaaaaaaagcaaagtgtgctcccaattacaaatatacagataagttatgagtgcctggagaacatgtttaaaaggagaagtactgcttggctttccaggattaagtcttatctgtgtggtctcagactcaacgtgacctctgtcatcctgtcagttcatctaagttgcagaaacaaacccaatgtgggaatgaggggaggcttagaactaagcctttcagtattttaaaaatattttaaaaattattattgaatagtcctgggagtttggtagtttaaggatttcatgtcaattttaaaagattatttttggaatcataatgaatttaactgtggcctttcttttaaaaaaatattattgtgttctagatgatgtattcatctgaagagtataagaagctcattatttctttgttttaatatcactcattagcacagaaatgaaaatgtcatataattcaatgttttgataaggaatctctgtttcactttaattaactttttgagaagcttatgcatgtcaactgtaatatgttacctacatttatataaaatatatttcctgtttctaaattccttcttctttacacacaaaatttagttgtgaaaactccaaatctctatcagcattcacaataaacagatgtaatcctgtacttacaataatattgtttttaagtgtatcttccagaattttctacttaaaatgaggggaaaaaaaagcaaggaaaaaacttaaggaattcccagaaattgcaacagggtctgcttctgtgctgatgagtggctccttgaggaacatcagccctcttattaatataacatctggcttgcatcttgcacaaataaaaacataagagtgagactgaagtaacagaagagggaagtgggaggatgggatgtgggttttccagcataataatttttaacagccaagaaatctaattagaagaaatgtcatttaatgaggctctggtcaaggtaattccacagaagaaggcaaagcctcatgggaccacaacaaaaacattgaatctgttagataatttacaaaataggtaaatggtatgcattgctgaaggacctcattcaatcaaaaccgtgattatcagtggcttctctggggaccatttatgactttaaccacagaaattccattccttggttaatatgttttgagaaggcctgtactgttctcatctgcacgatcagatttctgtcatttcctttgtgcattgtcagcctggaagacgagcgcatacctaattaacaacagaaacagaagccaattctcatgctgttacatagatgagtggaatggttcctcctctatacgaaacatcatttctaacaattttgttggaggtcaacttgatattaaaggtgaatgtcattgattctacaactcaatcttgttttttgtttttccagatatagaaacagaagcagtgaattgagattaggtaacattgactagtattgaatagaaataagaggtcatatagtaaataaataaatacatacataaataaaaactagactgaaggctttagctgatgttttgttgctgtttttttaagaaccagttgtctactttgagcaaggtatacctgatgttatcttttatgtatctgtgctccacataatctccacataaaccacttcctgtgctgcttggtgaaatttccaaggttctagagacaccaatcagccacatagtagagtcacacaaactagtttatgccagaaaaatagacatgtaaaaggaaatattggaaaaatgggattcttattaaaataaaaatacaatctactatgaaatatatttatttaagtaggtttgtaggtttcctaaatctagattcatctctgtttatgctgattacatttttttctttgcccttctcctattgaatatttttaattatgactcaataagacctgggttacataaaaaccagttaacattttcaatgatattttggcaataagtatgacatttttccaattaaaaataccaattaagttaatatgcctttaaaaatgcataactttcaacctaccatctctaagaatttatcctagttgaataagtatgcaggaacacatacagaagcatgtttaagctagcatttttgaaaacaaccaaatactttcctaagaaacaatgggcagcataaacaggccattgagtctaatttggccaatacgaaggagatgcagagatgtctgccaactccagtctttaataggctccttgctcatgtgactcaggcactcccaaaaaagtattgtaccgtggctggccgctgtggctcacgcctgtaatcccagcactttgggaggccgaggtgggcagatcatgaagtcaagagatggagaccattctggccaacatggtgaaaccctgtctgtactaaaaatacaaaaattagctgggcatagtggcgcatgcctgtaatcccagctactcgggaggctgaggcaggagaatcacttgaacccagaaggtggaggttgcagtgagcagagatggcgccattgcactccagcctgggcaacagagcgagactccatctcaaaaaaaataaataaataaataaaagaaagaaaggaaaaaaaaaaaaagtatcgtaccgtaaggtatagtttaagacacgctctagaaaggaatgtttaaaggacattagcaggcataaagagaaatcttggtaatgtatttatcttggtaatatagttccacatcgtaattaaagcactctctgagttgatcataccccactttgcagatacttacatgtatgatccacccaactctagattcccagttcttgactcccttagctccactggcctctcccttctccatcccttagacacccatacaaattgttgtgtcctggaaattatgtcatcattcaatctctacatctgccattctccttctgtcacttcctatgcagcttacttactctacagctcctacttcagaaatttccagacatcatggagtacggctcatcaccacctcactggccttctttctcaggcagtgaaagaaatctgttgtgaattcttctaactttctagtcttttcctctttaacttggagaaacagaagccccagtcactcagcttgagatctgaatgtaaagatctgcccctgttatatagtctgaagttttgctttttcatttttatcatagatatgacaaaatttatatgaaataccctttctgtaaaatgaggtttcttcccttttctggaatatctgtaaaatgagattagtggggtgggaggggggctatagatgtatattggagttaactggtttgtacatatcattaaacatatttttcccatgtaaatatgattctaaaaaacaactctgaatgtagtctgaaacacacacacacacacacacacacacacacacacaagcaaataagtgattatggtaatgctgttaggaaccgtaatattcaatacaaaagagacatattacaagacaaaaaaagtgaagcaaaaaccagttaatcccaaatttgaattgaaaataacagtataaactcacgatatattttctagctcttgtattttcattttttcttagctctgtctctggaaaaaacatgaaagtaatgatccatctgtagcaatgagcaccctgtagaacccagattgtgattgctaaatatcatttctcgccacaaaaagccagcctgtcttgcagaagtggctgattccaggtatgggatgagaaaaggacaagatagttcaggaatatttcttcacgccagatgcaaaggactttgttaaagactctgggttgtgttaggagtagttggaagtcaatctgaaagagttctcccaggcaaaataggggcaatcagacatcatcaataaagatagcttgaaatgcaatacctatgctaaaatgtacaggagtttgtaaaaatatttttaaaataaaacaaaatgccttctagacaacccctggaggaagtgagaagtcatacttaatttgagaaactagtaagtaaatagaaagaatcaagcatttattttctttctatgttaacttttcacagggtaatcattatgagaacaaatacttattattttaaaaaattcattattgatattagatttcaataacaaaaagataattagaaattccctaaatattttgaagttttaaaaattcaatgagtaaatgcagaagtaataaggaattcgaatataaccattttgttcccccaatgcaataatggatgcagataatgagtatgagtgactgccaaaactattaggtagaaagtgggtagaaatcttgatgatggattaatagtgctgacaatacctgaacaattaatcttcatgttaaaaataaacaaagggtgtggtgtagtgagacataaaaaaattatctgaattgctcaagcacagtatctcacaacgatttagaggaaattaagggttgaaggaacatttcttaaaaccacgtgcatcctaatagtaaaatctagaatatggaaattctatgagacaaaaaaaattttcttcaaaaaaaaaaaaatggcaagcaggaaaacgcagggggaaataatagatttgaagagacttatgaggcctatcaatcaaatgccatgaatgaaattttttggatcagcagaggaggataaaatagggctgctcacccagtagatggagtttaattttatttgaatgagtgcattataaactataggacagttttgacttgtgctgcgcaaatacatgctgtctttagcttgtggaaataatggtagaagcataaagccatgctcaatcctatttgtcctgtcactactaatttcatttccaagagagtgatgccttaacattctcagctctgaagtcagcaaaaattatgctccgtgtgattaaaaggcaatgacagctatgcttcccctggacttggggccaccttgtctgggatataagtgtaagatattctcatgaacattttcccattaccaacagactatatcttctcaggagaagaatggacattagtctccccagcatgttaaaggacaatgacaaattccagtactttgtaaaatttaaatagccttgaacttttaattagatgatacctatggttttagactgaaacaagaagtgatagttttgattcttggttggtatattcgtttgctagagttgccatagcaaataccacaaaccgagtggcttaaacaacaaaaatttattttgccacagttctggaggctagaaacaagatgaagctgtcctcagtctcggtttcctctgatgcttctctccttagcttgcagatgctcgtcttgttattgtgtcctcatgtggtcttttctctgtgtgcacccacccctggtgtctctctctgtgtttaagttcctcctcctgtaaggacattagtcagatctgattaaggccaccagagacctctcattttaacttaattacctcattaaagatctctcctcatatagtcatattctgaggtactggaggttaaaacttcaacatatgaattttgggaaaacataatccagccaatagcagttggaatgcacatttttcaagtcatgtaaaagatattgaaataaattatctttttgacagaatattagcaattccactgaagtttagttggtaaaactctttctatgtatttatttaggtgttcctattaatattcaggtatctattttctcacctattcttctgtagatttactatcttaaaaagcttgttagttttaaatctacactcatgctaaattctttcttcattccagtccaccattttgttaatacctgatgatttattttcattgcacaattcatgtcttatatctctttccataatgaaaataacacagtggatttcactttcattgaagatggaatgaccatcagttccattataacagtgaggaaacactggataaactaaacctcatatgagttttatatatatacactaaactaaaactcatatgagttttatatatatatactaaactaaaactcatatgagttttatatatgtatactaaagtaaaactcaagagttttatatatatatactaaactaaaactcatatgagttttatatatataaactaaaacactcatgagtttatatatatatacttattttatatatatatatatatatatatatatatatatatatatttgagtggttttaaatatatgttgttttttttttcagtaacccaggctcatttatttaaccagctaatcatttatccaaagcctttccattcttctcccaatatttttttactttaatatgtatatttttaagccacacagtgtgatggatgcatagaagtctaagtgaactaaattccaggcagagataaggccttcataggtgggtaaagaacagcagccactttcatacagggcacctttttctagtctttgccttggcagaggctgttcagtctgcctcccttaagcagacagattttggtgggaaaagagaaatgagccaaaatttgatggagagaatgatctgacatgacaaaaagaagtctggggaagcataaatgcaaaaacaaatccctcattctgaaaatcctcatgtcctgggaatctcagtgattgaatagtagtggggaaatagcaggagagcagcaggagatcttgcatcacaaacaagactaaagtttagtctggaggtaaactaaaactaacccaacctccctctcactcaaattctgataagattaagtaaatgggctcctcagagggcaataagggcaacttagaagtagggctgtaaggcagagagagattttatataatcttgttggaaaacagatagaaactgaaactaattaaagttgtggcccatgagggtatcttagtgatcagccttcacccaagttgtgtggagaagaaaagtgtgtgttctttctgggaaaaacaaaatgaaagaaaacaaaatacatacatatacgtattatctactttagtttctactgttcctttataaaaaatgcacaatataattttttaaaatatgagatttacaactaaacaaaaaatatgagccataatcaagagaaaaggcaatcaattaaggcagactaatagaccaccttgattttacactaagcagataaggaatttaaaaataattgttatgaagaatttaaaacatttagtggcaagatggataaaatacataaatagagaattttagcagagaaactaactctagcagcgaactaaatgaaaattctagaactgaaaattctagaaaattctagaattctacaatatatgaaacaaagaattcattggattggtctaatataattctggacaccagaagatagaaccaggaactcaagaaataggtcaatagcatatcagtttaaatataaagacaactagacacatcaaaataaaacttgtgaaaaaagaagaaacctatgcaaaaaatccccaaacaataaaaatcattaaatcagttagaatattcatattcagatgaacaacagtaagaatgacatttggtttctcaacagaaacaattagccagaagacagtacaaaagaaacaaaacaaaacaaaaacattaacccatagttcagtgtctagcaaaagtattcatcaaaaatgaaggtaaaatagaaactgttttagattagcaaaaattaagagcatttcttgtcagctgttctgcattagaatagaaactcttttagattggcaaaaattaagagaatttcttgtcagctgatctgcattagaagaaatgctcatgaaagatgatcagaatagcaccataggagaacgtggatctccaggagaaatgcagagcactggaaatggtgaataggttgtaaagtagtaaaatttcaagagagaccatcgattgtctaaaggtaaaataataacaaagtgctgtggacttttaaaaagatatagaagtataatatatgatggtgataacagaaggaatgagaggagcaaaggaaaagacattattctaaagtttttatatttaaggtggaatgcattaacttaaaatgtatgctgtaatgtttattctagaaaactgttaaaatgagcaaaaaacagtaaagctaaaaagccaataataaaaagccaatgaaaaatacatgactaatctaacaaaaaggaggaaaggaagaaaggagcacagaataagtgtgaaaggtagtaaccaaatgtaaaatggtaaatttaaactcaactgtacaggtaaacacattaggtgtaaatgaactaagcactccaattacaaggcagagatttagggagtggattaaaatatacccaactatatgctctgtataacagagacatttgaaatataaaaacatttacatcaaatgtaaaattatagaaaaagatatgacatgcagtctgtaccaaaatacctcatgtacactataaatatatacacctattatgtacccgcaaaaattaaaaatatttttaaaagatgtaaaatgcaaacactaattgtaagaaatatccagaatctattttagtatcaaccaaaatagactctaagacaagaaaaattatcataaataggtaacttttataatgataaaagggaaattcaccatgactatttaaaaattctcactgtagatgtacctaataacacatattcataaaaaataatcaatatttgacagaactaaaggagaaatacacaaatctacagtcctacctggactgattttatcttagtcattgctaagcaaaaacagctagctgggtgcagtggcttgcgcctgtagtcccagcacttttggaggccgaggcaggtgggtcatctgaggtcaggagtctgagactagcctggccaacatgacgaaatcccatctctactaaaaatttaaaaattagccaggcatggtggtaggcacctgtaatcccagccacttgggaagctgagacagaagaatcatttgaacccgggaggcagaggttgtggtgagctgagatcatgccactgtattccagcctgggtgacagaaaaaaaaaaaaagctgcaaaaatttgaagatttttaagcaaattgagctaattgacattaatttaacacttcatattcagatggaacattcaccaaagtaaacatatactgaatcctagagcacgtctaagtaaatttccaagaattaaaaacttgcagatttgtgttctgggacaaatgaaactagattagatatcagtaagaaaaagataactagaaaatccccaactatttggaaatttaaaaacataattctaaataatcttcttgggtaaagaaaaaatcctaagaaatggaaaacatgagaagtcagaagaatggttgcctggagggaaaattttatggaaaaaaaaaaaaaaaaaacaagaaggagcagtgtgggatgaatcacatcaattttcagtcttgtttaactaaaacggaccaatatgatttaagggtattgctacatacaggcataggccagacgtaaaagtcttaggaatctttggagtgttgcttttctgtctggaaacctctgtggcctgtggtgcctttgcccaagttcatgtcctgcacccaggaaggatgaggtacacacacaagtggagggtgagtaagatgaagaagagctttattgagtgttagaacagctcagaggagacctgcactgggcagctcctctctgtaggcaagtcgtcccatccagcattcagctctcagcagagggggtagctcctctctgcagctggttgtcccatagtctgcagctctcagcagagaggaggccctggagagggtagctcctctctgcagctggttgtcctgatgtctcctctgctctgtctgagtctggaatttttatggtcttcagatggaaggagtgcttgctgattggtccatgagccaccatggatgggctcaggaaaaagtatcatgagctcccccctccagctggcaggactggcagcctggctgccaggcttcaggaattcccctgcctgaaagtggggcttcactggggacctgcctgtttctgcccaggagcctgttttcctctcagccttgccattcatggtgcctaagctgttcataccaaggggcacctgcagaccagtgccaagctgccatcaggacctcctcagctttcctcccatgctcattgtgcccaaagtccaaagggggccgaggcagcagggggctggtgtgtcagcccttccctgattgtatgcacacccagccaggctgtgatggcacccaggctcagcccaactttgctccatgacaggagtgggcactggtagcagggagaggtcaggcagcaggagcaggcacttccgagcctgttgggggaaggggagcctttccagggccccaggagcacagggacactcagttctggagccatggcagggcaggtgcagtggcacttggggaggatgaggttcctgcctgttctgtggagtgggaggctcaggaagtctccccactgcagccagcattgtggcagcagccactctagatgggctgctgctgccatcaaaagtaacgatggagatgttcctgtcttggattaatccaataatttttaaatgaggcacagtcagcccttcctatttgtatgttccacatctggggattcaacaagacaatattctaacaaaagacagacaatattctaaaataatgatagtgaataatgcaaaatttgaaaatcagtataattatttatatagcattaacattatattaagtattgtcagtaactagagatgttttaaagtatatgggaggatgtgttcaggcttatgcaaatactacaccattttatagaagggatttgagcatcctcagattttggtatctgcagaaggtcctagaactaatctcccacatccccataccctcctccctaataaatagtgaacacaatggaaggcataattatgtaaacaaattttgggtggaatttttattgtatttgaagcatattcctagattactttttctgtgctcatttggccccttttaatcaactttgcttcaatatgaataagaaaagaagtttctctacctttcagaaccactttttcagtcctgcagcttccaaagcaatgtagacatctgtgaatttccagatgaaagctcaactaaaggtgaatttcactgatagcaggctgctactagcaaccaacttctgctgaatacagtatttaaaatagttattgctcaatgatccctcaaacaacggactaatttactaatgctcatgcatagctggatgcgcctctttcaacatttagtgaaaccaggtgtgagggctgactggaagagaagacacagttttaaggtaaagaggacactgaggaattacaggttggagcattagacttaaattaagagtgagaatagggacatattttgagcaaaaattatatttgaaattgacagctaaccaaaattatggagtgcattgaggttttttttaaaatgtatattttgctttatttttagaaaaaagtttagcagagttaaaaatttatgttggcctgcagctgtaaaaaactttattggtatcctttcactatttaatgcatgtcattggtgatggtcagatactatacatcactaccaaaactgttatgcctggcctatgctatttgtggcaataccgttatatcatggtaattgggtccttgaggttttccatcacaagttttgcatagggagcacaatttccttacttctacccacaatttcctttgcgtcattcttagcccagattagactagataactgtctcaaaggcatcttttggaaattttacaatccctccctttttaaaaatttttttttgccaggaaatattttcttgggtcataggtaatttgttttatccttgttgctcttattttttccacaaaggctatccaagcctacattttaaattaaggatcacgtctacacagtatgatcagctctatgctgaactttttagtgtagaattaacattgctgatatggaattctagtgatgaagttaaaggaaatgactaaaagaaaagcctaaaatacttcctatcttgaattccgaataatgggatcacttcacaaatcctatgcaataaatccgtgtcctgattctgtgctcagtgaattccaggaagtataatccattataatgatgagtgctagagagggtatgtgctgtactgtgatttcagttttgcattcaaaatatctcccaatttatgttccctgagggtatgctgttttctctctctgaaccctatgtaccatagaaaagtcaatcagacaggaggcaaagggagaaagttcactccctttcttagggatattgtaagtgggacagaagtagggcataaagttcagattataaaactacacactaattaatgccttgtgagaagccctcacatggccatgtgcagcatggcatggaaatattaatgcagggttagcagcaggagatgattgactatcaggctgagatggggctgctgacttttccatggcgtatgcaggaaaatcatggaatttaaaatgtagtgattgctcagtggggaagtgcagaaagctagagagaagctctaggtttctaggaagtgaggctttcaagaagctctaggtttctaggaagtgaggcttcctagaagcctaggaagtgaggctcaggacaaagaaggttcaatttgtgggaatttgcaagcggaaaatcaattggccaagaccacagaatctagcattggaagcccaaacaaacaaactttaaggccagctcagagcagttaccccgaagtgtttaccattcaagagagcaaactagactaagctactgcacatcacccaccagtaaggctccagagaaggctgaagggaacaggagtcatttctacctcccattctccactgcatgtaatgtcagacccacctcccccacagagccaacattatctggaaaagacaggaaaagaagatagagacaaataagactgctttagactgaacagaattggaaagactggttatgctagaagattgagatagtacctattggcaagtatgactgtttttattattcagtgaatggggacttgtgaaaaaggtagggtaaattatatgaaataaacaaagctacattttcttttaaatgctaaatgtttcatgggtgaatttgtgacctgaccatatacaaatagaaaaaaaaaacagttccccaaaatgaaaggcaattgtttatattattaacacgaggagtatttggtctgcacattagtagggtttttcttaatttttttttccagcaagagggagtgaagcatgtagtggccgacagtgttgggtctggagccagtttccccatttgcaaaataaagataatagtgatatctacctcatagagtggttataaggatgagaacagttaacgcatgtagaatataaaataaaatacctcatagccagcattcaatagacattactgtcattttgaaaaataaaagaaaatctctaagagtttaggtgagcatgagatcactacagaatgcaatcatctaccagaaattgaagtttatgttgttcttttaaaaaagaaaacagccatgggattgggagggaatcattcaagtccgttgaagagctaagtcctatgggcaggggtcaacaaatgctcttcaagaaaaagaaaaataccacaggtgtctatgtcttcaactactgaagtacacattagtttctgggagaatgtcctgcattatgctttttcccacacatttctccccaggggctcagaaaacatgacaactccagatgtatttcatcatgtcaataaggcttcaggaggctacacttttgaaatggtaagtcagctaggatttgtcctagattgtcctaggacttgggggctacagcataagtttctctgtccctagattttgtggttctcactgcacctcatacctggaatcctatccttataaataagccagcagggcatgtccacaggcaaccgcaagatcatcttttttgacaactcaaggcatgcataaaaattagaaacagaaatgtaataaatcccttaaaaataaggttaggaagaaaggaatctctgttgcctcatgtttcacccccactatttttagtccttcaaatgatatgctggaacaacataatgaatgcttattgaatgcatgaataaaggaatggaaaaaaggcagtagcagcttagaaagcagagctctcatgaatccaatataccaagtagttctcatatttagctcaacttacctttgtgaatacatactgtgggcaaggttaacaagatacacagagctcctaccttaaaaaattttccatttgctcagctttggccttggccatttaagtggaggttatccatacttgcaatgcgctctctttctctggaattcagcaggtgaccctcccatttaccctcctgccccgccacttcatgagtccatcattctatctgtctggtcatctctgggttgtactctaactctggattcacatctgtttaatgatctattttgacatatttatccaaattttttaccttaatccctttgcactcggctgctggtattaaatggtcaccaccattgaactaatggaggaggtgtgaaggaagttatcaaagaaaattttgactggataaattgcaggacttaacttacaacctgtaatttaaactataaaggtaaaaaaacatttatggcactaatgcagttttggatcctgactgaagagaggatttgggtaaatatagagaatagtcttggtggcaggaagaaatgatgagagagacaggagagagagagagaataactaataaccttatataaaaatgaataaaatctgcctttcctattgtattttagtcaatgtttggtttttccatacactaaccatttcacaacattaagcacttttataactactttataaacgcataaactactttataagggaatatactgagattcagcaagcttaaatgattgtctaagattccaggctatggccaactgactctaagtctgttactctcctagacagataaaatgagtgaacaacttatattcctgttccaacataatttgaatatgatttacatcaatgcaaggaggcacaagaatgtatttggaaagaacaaaactccaagtgttagggaacttggttttcccttcagacgctgactctacaataatgtgatcagtttgcttcttgcttttgagtatgagaattctaaatgcagtctgtgacgtgactgtcctggactcccttatctccaaacttttccttatcttcctgttctaacagttcaagattcattaaactgggtgtccaataaaagtcatgtatggaacggccaacatgtaagacaggagaagggctcatctgcaaggctgtgaaaaactttcctgtcgttctaacattgtcaagacactaatgaacatcagaaatccttaaataataagaaaactcatgagagatgaccgacttgtctggaatggtgccacaaggcaaaggaaggacttgatagacaatacaaatcagatttcagaatcttagttgtaacccccaccactcactactattgagatgttagccatcaacataaaaacagctggaatagattgatatttggactctctttggaatttctttgtttctaatgtattttaaaagtattttttgaaagttctgttactaattctgaccactaagaatgctttctgtgaattgtttctgtggactgtttgtatgtgatacacatctgagatacatgataaagtatttggtattttatgctctatatttatcatcttctcaatctgatgttttggaaaaaagattgtgtactaaggtcttgtgtgtttgctggtgatggttagctcttttaaattatcagacttttttttaccaaattataatgatctattattaaggccaaacacaatttggcttgcagcaagcctcatctggctggttaatcatgaggacctgatcttgattcatcaacagattacagagaaggcactcatgtatggttatggtaaccaacatttttggtattcctcaataaatcaaaattctaaatatctgaggagatgcctatttaaccaaactttatatagaaggcttgctctaacactacattgtatttgttttaaaaatatataatggcttttgaggttctagaggaaaatgaatctactcatatgttcaacttcagaacagttaggagaagtaatcttcgttgttgttgatgttgttattgaggagcagtgttctgtgtacataaatagtgtagtgaggaagagagacaaaaatctcttcagtcagttcaactatccaagtcctggcagtgaatggaaacatgaatcccaggctttgaatcaattcttgtataaacatgtactttggagaagactttctactcttgttatatagtctttttctcatgcatttagtagatagatacatgttgggaacaagccatctgtaaggcattgcaataagcacagagtgtgaaaaaaaatataaggccttatcctgttttcaggaggtaaaacgacactaaccccagtaagaagcaatcatggaaagggccaaatgagaatgggggaaaagtcacaggattaaagcacagccatgagtcagaagtgtgtaggaataaactttttttttttttgctcataaatctcaattcctttacaagcacttattcttgttcagcagtggaaaacctttagaacatagtctcatgtaaaaattcaatttcaagtacatatttttttctagtctactttagtctgcattcaactgccagctctgtgcgacccgtgctggcatggtgcagctgcctgtgcttatggtagtctctctggcttgatctgggacacatctgattttcagtcttgatgagggcatatttcccaaaagatcaagggagattccctcagttgcctccccacaatccgttcatcatcaagtagaggaccagcgtggtggtctcactcttcttcacatgttcttctagtcctctcttgcagtccgtcttatagcaactattccagtggtgagagagaaattactgtttgctgatttcacgtggccagatgggtctttaccagatgtagtggttttcattcttacttgtgaatggtctacatagcaatccatgcgtgtgtactttgtctgccagaataaaggtgaagttgagtagagagataggatgaatgggagagagagggaaacaacttgtaatatagggagcagaaagggaattcaccactgacgttatacatgattgtgttacaattataatttcttggtgttcagaggttggatgatcttatattctcatttgcttgtgagagccctgattcattccttttgttctagtatattcttaatagtgtcacatttcatttttgcaatgtcctagattgaatgacaaattatatgaagacactactcaggggataactttatgaggcaaatggagtttgactatagatcaagtttggcaaatgattttcaattatctaccagctctaaacagagggtgcctctggagggctggctggagaagaatctgaggctctgttagggcttagcagagataatgagagctgtcttctatgggtgtagtataggtaaggattcaaattattccagttattcaacttaaagctgattttccaggtcattcatggagcatacacaatttgtaattcacaatactttgatcctttgatgccaaaaacctagacagactgactcaaataatatcacagtcaagtagggattaatccaaaaataccctaagctcaaaatatgcacagctaaacttttagtgtctcttcattatatctgactatcaatatctgtctattcagccatccatttatcttgtatgtatgtacgatctatctatctatctatctatctatctatctatctatctatctatcatctatctatctatctgtctgtctatctatctgtctgtctatctattcatccatctatctatatcatcagttactttatctcttctggttaagggtgatagaattcacccagacatgggaacctagaaaactggggttattttccacttcattctttctctcactgtcatgtcaagatgatcatcatggcctccatagctgtattccctcccatatgtatcaaaaacatatcctctgttatacccccactaaagaacagacccagttcagatcctaattatttctcatttggaccattgtcaaaagcattgaaattcttctctttacttactacaattattgcatccttcacacaatctaccacaagagtgacctttcaaaaacccaagtctttctgtcttaccccctggagtaccattttttagagcattgcaaatgcatacagcagtagttctcaaaatgaggtcccagaccaggagcatcagcatctctttggaaatgcaatttctcaggccctacaccagacctagtctggatctatatattaggacccagaaaatctgtattttaacaagttattcagatgattctcatgcatattccaacttgagagctacttgtctagaggctaaactattccctagacaacttgacctggattgttcttttcagtacctttggaagccatgcaaattctctcttaattctttatctcacaaccttgggtcacatctcttgatacttctctatgtttttgtacattctatttcatatgcttgggatggcttttccttctgtgccattcttgactatccttaaagtcaactataattgagctcttctgtaattgtgaagattgttccacttgcttcactcaaccagctccttcaagttcagtggagttaatttctccctcccctgtgcttctagaattccttgtatgcacttattttacagacattcattgtgtattgctagttttatatatgttttcctcttctgctggaatatgaccttctaaaaacgcagtgatgctgtcctagtaaatgcatgaattgatgagtcaagaaaccaggcacattcactattaactccaaaagtggctcttataatgccattacagccgttgaaagaggttctcagagaagggggagaacaatgtttctcatattcctctaattcattattgtcatggggcattatgcattattttaaaagtctgcatagttaggtactgttagacaatactattttaagtgcagataaacaggctgttatgaggcaagttgtcaaatgtgctactgtgaatttccaaagagaagatatgaaattttctcagaacttttatctcataaacattctccttgtggaacactttagaagcctcatatttgggggcaacatactctgcgaagtgctgctccaaacaatgggtttgtgcgtgaacactgtgcttgtatctctaaaatcccttcccactcttgttttacagcaggtgtattgtaggatgggtgctggagacgggaggatcgatctgactttgtcactgacaatagcttaaccagcagcagaagaagctacgtccattaccgttactcatgtatacctgttctgcccaaattttggccattctgttatttaatgatttttttttaaagttgcacagatgatgacacatattagtgctggaagaaaaggtggcaagtgtgaaagtatccaacaaaatgggtggaatggaaggtggtatgatgtgaggctggagtgctgtgcgagccagagcttgtgattttccacaagaaaaatcacagaccctgcaaggagaattggattgaggatcaagaagacactagagtgtttcaagcattttttaagaagcaacttcatagaaatcaaccttattggtatagtatttacatattacatattcacccattttaagcagctgctatgtggagacattatttccctctatcctttgccattcttaattttagtaaaaaatttaaatctgggccaggcacagtagcacatgcctgtaatcccagcactttagaaggccaaggctggaggatctcttgaagcgaggaagtcatcctgagcaagaccacatctctactaaaaaaaaaaaaaaaatctaattttaacctgcatttcttgaattagaagatatcattttttctattcttatcttgagcggtcatttatatttatttttctgaaatatctgctttgcccacttttctgttggaggcatgtgtatacatacacaggcaattacacatttgtaggattgattcctgtattatataaatatatgtactttttatgtgtgttagaaagagctcttgcatgcactttcttttttaattttgattcccccccacaactttaaacatttcttatataaatgaaataatcttttcctatgtggctatgggctttgcgtacttcttgtacagatacttgtagttcagggactacccagaatctgaaccccctttttttttttaattatactttaagttttagggtacatgtgcacattgtgcaggttagttacatatgtatacatgtgccatgctggtgcactgcacccactaacttgtcatctagcattaggtatatctcccaatgctatccctcccccctccccccaccccacaactgtccccagagtgtgatattccccttcctgtgtccatgtgatctcattgttcaattcccacctatgagtgagaatatgcggtgtttggttttttgttcttgcgatagtttactgagaatgatgttttccaatttcatccatgtccctacaaaggacatgaactcatcattttttatggctgcatagtattccatggtgtatatgtgccacattttcttaatccagtctatcattgttggacatttgggttggttccaagtctttgctattgtgaataatgccgcaataaacatacgtgtgcatatgtctttatagcagcatgatttatagtcctttgggtatatacccagtaatgggatggctgggtcaaatggtatttctagttctagatccctgaggaatcgccacactgacttccacaatggttgaactagtttaccgtcccaccaacagtgtaaaagtgttcctatttctccacatcctctccagcacctgttgtttcctgactttttaatgattgccattctaactggtgtgagatggtatctcattgtggttttgatttgcatttctctgatggccagtgatgatgagcattttttcatgtgttttttggctgcataaatgtcttcttttgagaagtgtctgttcatgtccttcgcccactttttgatggggttgtttgtttttttcctgtaaatttgtttgagttcattgtagattctggatattagccctttgtcagatgagtaggttgtgaaaattttctcccattctgtaggttgcctgttcactctgatggtagtttcttttgctgtgcagaagctctttagtttcattagatcccatttgtcaattttggcttttgttgccattgcttttggtgttttagacatgaagtccttgcccatgcctatgtcctgaatggtaatgcctaggttttcttctagggtttttatggtttgaggtctaacgtttaagtctttaatccatcttgaattgatttttgtataaggtgtaaggaagggatccagtttcagctttctccatatggctagccagttttcccagcaccatttattaaatagggaatcctttccccattgcttgtttttctcaggtttgtcaaagatcagagagttgtagatatgcagcattatttctgagggctctgttctgttccattgatctatatctctgttttggtaccagtaccatgctgttttggttactgtagccttgtagtatagtttgaagtcaggtagtgtgatgcctccagctttgttcttttggcttaggattgccttggtgatgcgggctcatttttggttccatatgaactttaaagtagttttttccaattctgtgaagaaaggcattggtagcttgatggggatggcattgaatctgtaaactaccttggggagtatggccattttcacgatattgattcttcctacccatgagcatggaatgttcttccatttgtttgtatgctcttttatttccttgagcagtggtttgtagttctccttgaagaggtccttcacatcccttgtaagttggattcctaggtattttattctgtttgaagcaattgtgaatgggaaatcactcatgatttggctctctgtttgtctattgctggtgtataagaatgcttgtgatttttgtacattgattttgtatcctgagactttgctgaagttgcttatcagcttaaggagattttggcctgagacaatggggttttctagatatacaatcacgtcgtctgcaaacagggacaatttgacttcctcttttcctaattgaataccctttttttccttctcctgcctaattgccctggccagaacttgcaacactatgttgaataggagtggtgagagagggcatccctgtcttgtgccagttttcaaagggaatgcttccagtttttgcccattcagtatgatattggctgtgggtttgtcatagatagctcttattattttgaaatacgtcccatcaatacctaatttattgagagtttttagcatgaagagttgttgaattttgtcaaaggctttaaattggacaacccttcatgctgaacccccttcttatgcttgataattactgaccataaaactccattgacaggcccagctaagagtccacttcctaatctgaagatctaaggactagatacttgctttttcagcttcccttgcagccagagtgctggttggtatatgatctagattcagtccatttgagtctcccacccagaactttgcattagaagccagtgaagtaaacacacagacctgcgggagcagcagcggcagcaacattcttaacgtgggatcactggtggcaatggtgctgataggacgagagtccatgaccagtgcctacagcaaggtgatgaagacattcctggctcggggtgatagcaattgtgactcacgggctggttctgtggcatgaatgtggcggtgctttgtctgcctagtcttcctttgttcctgctcattttccaagcctgcttttctagctcacccaatgagtctctgtgttttcatacattattttacaactttggatgaccagttttttattattattattccttgaaaataagaagtctggttagtacatttctccactcaatattttaagatatatattgatacttttccccactatttttatgggttatttagttatattttataagtttaaatcttagaataatttagagtgtatttggaaataagacatgaggtaacaaatccagctgctgctcatgttgctcctcctcctcctcttcctcctcctccttctcttgctcatcctttagtcctaaatagctagacattgttccagcttctcttatttaacaatctatttcctccattgatttttaaatgcaaacttaaacatgcacaacatcccagatgcacttctgtactcaattttgcttcattgatggttctgtgtatttctgtaaaactatctaaattttaatttctgcagttttctaatctgtttgaataatagttactacatagtactaactatgtacctccctctctctcacttataattttttggtaattcttaccagcttatttttctagataaatgtcaatatcgtgttgctaaatcccttatgtatttaatttgttatttgtatttaattacattctcttcatagattgacataataaggatttgaagaattgatatatttataattgttgttttcctatttaagagaaggcaatccttttcacattcttctatttaaaaacaagataaaccttttaatattattctgtaaagaagaacattcttttctttttctctttctaccctccctttgttctgattataacaatgcactcatgggttttcaaaattatgtgtgttgtaatctatcactgtcattctacttgatgcccgtatattcccccatttggccagtgggagctcctgtgtccttttgacatgactccatttatctttgaacgttgaccccattaatccttcagactgtattcctactgtggatgggaactccaatcacatatgattaaattatagagtggaataaaatgaagctagctcctcctgtcaccttaccttatataatagtacacctcacgccccatgcaagcctcccaaggttgttttattttcttctgtcttaatagcatcagcatattgcaagcttgacactatttctgctctttttacaattaaacatcaaaaacagtcaacaatatttctaactattcattttaaagatctatgggatttacagggcctcacttgcctggaatttgcccctgaattaggggcaatctttaatttgctgactctctgagaggtttcagctggaatcaactgaaagctataacttacatttgcacatggcaaagagatctgttttacaaaaactgatagttgattatacaggttttgatctaaaatgttgaccttccaaaaccctgaaatgaatgttgtttttaatccatttaaaaaattagccaaagtaatatatgctatgatttaaaaatctgttaatagaaaaaaactttcattgacaagctgcctcattctttcccccctccagtcctgtctccagaggaaattaattgaatctgtttctaataattcagaaagtcccatctcgcatttaatactgtgtgtttatttattaattttagatgttatctcctgggttcctgctttgataaaagatgattgagtaaatgtagcacttcctccttttcccaatttagaaataccactattccctggttctctatttgatagatttgtaacattaagaaatatacttgtattagttttctagggctgccataacaaagttctacaaattgggtggcttcagcaggaaaaaaattattgtcttagagttctgaggaccagaagcccagaatcaaggtatcaaggagggttatttccttctgagggctctaagagaaagatctgccccaggcctctctctctttggcttacagattaccatctactccagcatcttccctccgtgcatgcatctgtgtcctactttccctctcttataaaggcacgggtttgtattgcccaaccccttcccctgaatggcctcattttaacctgattacccctacaaagaccctgtctccaaagaaggtcatattccaaggtactgggggctaggactctagcatatgttttgggaggtgacacaattcaacccagaacaataattatatcttgatattatgtctttatttcctgttccactaagattttccccagacacttcactttataagatgacaactgttaacatccttgaacttcttttaaattcttctaaatcctctgtctgcatttcgctttttttttttttttttttttttggagacatagtctcactctggcccaggctgcagtgcagtggtgattatacagtgcagtggtgataatagctcactgtagcctcaaactcctgggctcaaggaattctcccatctcagcctcctgagtagctgggattataggtggcaccaccacacctggctaattttttattttttatttttttgtaggtacatggtttcactgtgttgcccaggatggtctcaaactcatggcctcaagcaatactcagacttcagcctctgaaagtgctgggattataggcgtgaaccactgtgactggcctgtatttt

SEQ ID NO: 412 - DNA, 127547 bp, Homo sapiens
gtaggagccccgcgcggtgcgcgctcacgcacgcgcacggcctcgcctgcgcgctcacgaggcctctcgcggcacgcgcccccgccccgcgccgccccgccccgccccgcctcttccccctcccgcgcgcccgcccgccgcctgccgccgccgccgccgccgccggagctctgtagtatggcatcgaggagaatggagaccaaacctgtgataacctgtctcaaaaccctcctcatcatctactccttcgtcttctgggtaagtgcccacgccgggccggtggccgagtcgctgtccatcggtccgtatgatgatgctctgagaaaagaagtggggaggaaaacccaaaccaaaaatcaaatctgggacccctctttaaggagacaggcgcggggtgctgggtcggggctgcaggatggcagggtgcgggtcggggctgctggaaccctagacctcgctccgcgcaggctgcaaggggctgcggagtgtcggtgactgcaggttgtcgaccttccaaaaaaaaaatgttaatgcattagtttcttttataatctcccgggatagggtcagctcctggggaaagttgcgggtttattcgtctgttttcctcgctgtacacctttctctcccttcccctaccagccggttcgcggcgcctcttggagctaacctgtggcgggctaggagaggacacgggagcgtggggtttaatctcagattcccagttattcctgaccccacggggctgcgggagggaggcaccagaagcaccgtgcctgcctggctgggcaagggcgaccgaagtctcccaagcgcacgatggggagcaggcgttgtcaccgcgtggaggcgcacgaaagggagagggtcttacataagccgggggcatctttgaggtttcttggtgacccaagagatgagtctttggattcctttcccacctccctgcatccttacactccctatctggtggttctgtcactgcatgagcacaatccgcagcgccctggcagagggtcccctccacttggtgatagagatagcgccccaactctactccccatctatccagtgctgccgccggtccttgaagctcaatgcagaagggtgacgtcacccctcagccagggccgcggggggctgcgtggtgcacctcgcggagggatgcgcctttctgcgcgggggaggggggaggaggaggagggggaggaggaggaggaggagggggctccaggcttgtgccttacctcatcctgtttggcaaatcatggaatcagtgcagggctgacactgcagtgattcactgagagaggtgcgtggtacttaaagaccattccctgttatttctcttttcatgtcggtgaccccgtcttccctagttccttacgcccataatcaagctacagctaccccgcaggggaatgaatatcgaccctcttccccccttgtcccccaaatctgggtcattttagcttctacggcagtcattttgaaatctgaggctctgtaggaaaagccagttcaacctttgcttgttttcttcttgcacccctcacccccgcccctcacccaccaccatatattagccctatttttgctttgaaactggagcacagtgctgtatgaggtaccgagaatcagctagatggcaaaccggactgtttgcaatggtcaaggaagaagcagagatttattgaggatcaaaaatattcctaatgcacccggacatttccttatcgctggcgttggtggttcttcaagtcagggaaggtatggactccccagaccacacataccaggagctctgcaatgagctaggatagattaactggcatattgcacaaggcaaacacagaaacggactttatttggactgacaacgacacaggttgaaatgtctcagtagtggaattgtgagctatgcacagatcatatcatcttatgctctgcctgtaaaaagcagtaacacatgctgattgctgaaacttcccagtagccattcctgggaactggtttagctttttatgtgtttccttaaatctctttttgtttggccctttatcatttacttgacttcctatttgttactggagtgaatcatattgggaggggggaggtatttttatcttccttaaaaataaggttaacagtgcacatgaagaaatattgttctttcagaatcactgcaagctggtaaagaagggggtcttccaggctgaggcttttcatatgagcactttaactctccttgcttacattccacccctatgaatctaattacttaatgcccccaatacatcttaaacaatcactgcattttatgtcctccggaagttccttgatgccttcattttaattttttctactttcaagattttcatagtcttaaatgttaacctggaacattttcaatagtttaaataccaaagccagttctggctttggttgttgtaatcatttcatacttacaaccaaaagaataagatctcttcggatgtgtgaggatattttaaacaagacgttatttttaagtagccttattgaggcatgattcatatgccataaaagccacctatttaaagtatacgattcagtgagttttagtataagtagcacatattttagtatataagtggtatatatttctgtatatttagtatattcatagatatgtgcaaccatcaccccagtcaattttagaacattgcatcatttcacaagaaacctgtttctttagctgttatcccgtttaccccccaatttcaacttcccaccctcatgcccaccccctgccagccctaagcaaccactactttctgtctctagagatttccatattgcaggcatttcatataaatgtaatcatacaatagttgcccttttgtgactgtttttttcactcagcataattacttcaaggttcatccatgttgtagtgtatatcagtacttcattcctttttatggttgaataatattccattgaatgattatagcacattttgtttatccatttgtctgttgggggacatttgagttgattgggtcatttagctatcatggataatggtgctataaacattcatgtacagatttttgtgtgaacatgtcttcatttctattgggtatgtacctgggagttgaattgctaggtcacatggtaattctaagtttaattgtttgaagaactgccagcctgtttcacaaagcaaagcactccttccctttgaccatgaggattccaatttctccacatccttgccaacatttgttattgcctgacttttttattatagccttagtaggtgtgaaggtggtatctcactgtggttctggtatgaatttccctgatgtgtaatgatgctgagtgtcttttttatgtgcttgttggtcatttgtgtatctttcttgaagaaatatttattcatatcttttgaccatcttaagatgtggggtttttttatattaagtagtaagagccctttatatattctgagtacaagtccctcatcagatacatgatttacaagtgttttctcctattttgtgggttatctttagatggtgtcctttgaagtacaaaagtttatttttatgaagtccagcttacctattttttctttttttttgtttatgcttttggtgtcatatttgagaatcctttgccaaaaccaaggtcacaaatatttacctgttaaatgtttataagaattatctctcagttcagtaaatgcagttggtaaatctttcttcagcacttagaactatgtctggcacatagtaggtactcaaatatttgtcaaaacttctgggattatgctaggtagtttacaaaaagatgaccttactggtcttgtttgtttgtttgtttgtttgttcgaggcagagtctcgctgtgttgcccaggctggagtgcagtggtgtgacctcagctcactgcaacctccgcctcctggattcaagtgattctcctgcctcagcctgccgagtagctgggactacaggtgtgtgccaccacgcccggctaatttttgtatttttagtagagacggggtttcaccatgtgggccaggatggtctcgatcccttgacctcgtgatctgcccgcctcagcctcccaaagtgctgggattacaggcgtgagccaccacacccagccgaccttggtgttctttaaagtggaaggtggaggaaagattagacagaattatttcctttgtgttcgtgagttgttttaataggaatttttccctttcattaccttaatttagatttagaactagaaggcatttgaacttaaaatggtggtagagcagtagcatcataaaggttgacatacttgagcatatgttaaaccagaagtctacacttttgaaagagagattattgttttatctggctttctctcctgtctataatcacactctctctctgaggtgtttctctaaagtggtggttctcaaaagggggcagttttgcccccctcccatatttggcaatgtctggagacatttttggccatagctggaggggaggatgatactggcctttcgtgggtagaggccacagatgctgctaaacatcctacagtacatgagacaacccctcacaacaaagaattgccttgctcaaaatgtcaacagtgtaaccaacctctgcactactggacttacatagcagtaagtcctgtgaagaaaaaatggagcgttatgcaaaactgtatatttattggtgtttggaaccaccgtagcagagcatgcgcaacacaatcacgtgagaagaaaaacattctctattgtgtactatataattatttgaagacaaaaggtaggtacctctttatataattgtgtttgaatggatgggatgatttgtcttttggttaaataatatcacctgaatgctgtgtaaactgatccttcatttctcctgatttgtatgttttattttcaggtctatagaagaggagggaaaaacacacctaggagtaagttatcctgtgctttaaagactagcaaacaatgtcaggcttatagtaggtttactcactaaatacttatttccttaatgaatgaatgaattaatgaataaatgaaattttattgactactcttgggctcagttatttatttcaactcacctcaatgggaaagtttttttaaaacaatgttatttctagtctacctgtagtgatttaaatgtgctcctccaataaatatgtgaaaagatggaatagcagatttcacaaggacttgcttatcctaatgatagttcaatcattatatttttgtgatcagttagtttgtcagacattttggttatttaaatttttaattagaattttttaagcatgaataaaaaagatcttgccctatatatatataacaaaatatcctttcttcacaaccaatgtaactgtttcaagatcaagcaaagaaatgtaataaatattttgcttaccaggtgaatttttgttttatttatacatttttaatgtattttaaatactcatctgagttctaagctaagatttaaatccaccatgtgtgaagagaagttccccttgcttaattcaagtgtatattgggcctgatttcttgattatctaaggaggtaattagcttatcaatagtgctatcaaattcttctatgataaaatatcagcgatttgtttttcatttgagaaacatcactaatcttttctggaaaaataatttaaaacaatttttttttttgtccagaaagtttaggtacttgggatataaatagagggaaaagtcttaaagagcaactcctaacattttaaagagtgtttgaatttgggcactgtattagtctgttcttaagctgctaataaagacatacatgagactgtaatttataaaggaaaggggtttaattgactcacagttccacatggctggggaggccccaaaatcatggctgaaggcgaatgagcagcaaagttacatcttacatggtggtaggcaggaaagcttgtgcagaggaactcccatttataaaaccatcagatcttgtgagacttattcactatcaggagaacagcatgggaaaaacctaccttcatgattcaattatctcccactgggtccctcccacaacaagtgggaattatgggagctacaattcaaaatgagatttgagtggggacacagccaaaccatatcaggcacatactttagtttatagttattcttttgcacatcaatacaattcagtcattcactgaatgtctattacatgtcaggtattgagtagtcaatagaatgtgtaccaacgtttactagctgctgcttttggcattttacctgcattttaaaataacacatgtattctatttctcaacttttcagttttagatgttatgtactgtcttcccactatggaagatgaagatttagctctcttgcccttttctcccatacttgtatcttccctatattgtagtagaccctaatatatcattttatcattgtcatattttggttagagtggtcgtcagtgatttcattatgttaatgactaggtaaacctagtcacagctgagccatgtagtgtgtatattatgattacttgcatagctttttgttttctctacagttaagaattgccttgtttggtcctttgctttttagttgcgtgctcactcctaatttatccctgtactttccccaagatctgtttcttcactcagtctgttcaaacacttcatgtgtcatatcagattcttgttctcagaggcatttctcccaaagctttctgatcttcaatctggactagtattttctgggcctttgaaacagtggacatcaatatagtctcccttcaccatcatcctggtgaatcctgtctccttttacgttggatcctcggtttttgagatgtcatgtctttctcttccttggtgtttttttttttttcattttggtagagcaagtttaataattttctggaaaaaatgatgtattgggggttaattttttgagctcttacaggtatgaaaatcttatttttctcttgcacttaatttgatcatttggcttagtgtagaattgtagtttggaaatcatttatcctcagaatttttctgtttctccctattccaagtcttgttcttgttgttggtgttgagaaatcagatgttattctgattcttcttgaatcctgcttttcttctctgaaagttcttatgatctcttgcttgctctgaaatttcacaacaatatgctctggtatatgtctattttaaactatttcctgggtaccctttcaatctggaaattttctgtatacctttcaatctggtccttgagtttggggaaattttcttttgttttttgttttctttaccttcatttttttctgtcctatttggatgttggacctcctagactaatcctctaattttctccccttctattttctacctctttttcttcttgttctatttctgggagatcacttccactttatcttgctgctattgcatttttcatttgtttcatatgttaatttctagaagcttctttttgaggtctgaatgttctttttttctagcatcctgtttttgtttcatgagtgtaatatagttttaatatctctctgaaaatattagtaatttttttgagtttgcttcttcctgcatagtttccttcagactgttctgttttctggcatattacaggcttacctcaaatttctggtcatgttttgctcttttttctgtacgtgtttaagagggggcactacgaagctgattggaagctcttagcctgaagtacgtgtttatcaattgtaatttgggtgatttggctgggcagttgagttttaggaccaaggtcaatatctttaggtctcttcttttggtctcatcagatatcctacagaagaatcttctaattgctctctgagtaaagaaggtgagaatatagaagtctctatatacagtatataaacctttgcttaagctcctgtttccagtgtagaatccatgtccactgtgcttatattccccagttcagggaccatctctttcaccctccaaagaataaatatctgaacctatagtagaatgagtagaggccagagacaggaagttggtggcgggggtgggggtggggaatctaattgtttttcgaaaaactcttactggaacctacttattttagctcccctttcctccctacttccaggtgtgcatggagctgctaacccctgagtcttttggggatgtttgggtgcaaatattttattttgtgcttctctcacagctgccataagattttgctttttctcagctttgaagagatcattgtggttgtctcctctctttgttattgtaggttaaaaacattcttttagtgtcatttcagtggagttttgggagatagccagggtaaatggatgtgttcaatccgtcatctttaactggaagtcctttatatctttatctctacatcagatggtactaattaaatacccagttgattgtgagtgattgaatagagcatctaaaacagcaatagtcgggctattctaataaatattggtacccagttttcaatttttaaaaagcttttggatttcaagggaagtgttctaagttggaacagacttactaagacacatcctctgtaaggtcgtctggtcatcagcgactggacaaatggaaatgaagctctgaaggttgctgctgctttttctgcccctcttatttcttcccaccagatgaagtcccatgtgtcttctgacctaattcggaccttgctggattaatttagtgtttatagtgtggtgtgtgtgttggggagaggaccttgatgttaaactgattattgcttggctgtttttcttttactacagtgataacccttcatggttattatgggacttgtacattataatctggagttttttcttattttatcaacttaatttactatacgcaatatacagttaggatgtgtgaactaccttttataacatttggggaacattaagtctttttcacttagtcgttgcttagaaattagctgaattttggtctaaatagaatgaaatactcttctccattctaatcacaactagagttcttgatttgaccttattgtgagttgcattacttattcagtgattgttctttatatactgctttaagtaagtacctcagaaggtgctgaaaattgaaagtcattgtgactgtgtttctttgtttaaacatgttaaactcttgacatagatgactaatgcactgctaaacccatttgaaacacactttaaaaatatattcttatgtatttttctcctttagttccattacagcagcttccaatctgagttacctcctcattgcaagcagatttttggaatgctgctcttaaatttcttattttggctgttattccccttgccatgacagaatgattttcattcttggctgaacatttttttcatcttactgcagaaccccactattcatcaagaaaaggatgtagaggaaaaaggagagggttttctttgttttgtttttccttttggttatttgatcagttaaacaggtaagcattttatttatttgtttattgccttttgaaacatttattattttatagatttagggaatacaagtgcagttttgttacatatatatattgcatagtggtgaagtctgggcttttagtgtaaagcatttaaaatagtttaaacatcacattttgactctggaagattttctttggtgctttctgcaagatatagtgggattttcccatcatcatctgtttctaggagaaattccaggtgccttatactagaggatgatgagatgagtcagacacaggtactggtgaacagacataggtactagatcagtgattctcaccctgtttgcccatagaattgcctaaggggccctaaagaagatacttagaccccatcctaagagattctgattcaactggtctggacagagtgccagaattgatatgctaaaatatgctcccaggtgattcagctgtgcaattaggattgagaaacattgatccagggagaactcagtagataatagtaggcttggttcacttgagcctcctggatctgcaggtagctacggagtatctaacctagtactggcaatattaatttggtcttcgttgcctgagagtctggaaccaggcctgcagtgtctttcagtaaaccaaaatggccttgcactcttaggagaccatgctaatcattcctgactaaagcaatgtgtatcagaatcaccaaggacatttaaaaacacagattctcagccctatctcatagagtttaagttttaattgatatgaagagaaacctgggtgtgtgagttaaaaaaaaaaaatcccaaggtgattctgattcctgggatgtagctctatggggctgtgatgccatttgatataaatgagttcttacctcatgaatgctttcctatgatatgatctgtggtaccataaagctgaattgaggagagtattccagaaaacaagatgtagtcaatgtagcatttttcttacccacttaattggtctttggcaagggtcttcaagtgaactcttggagtttggagtagtttccattccttagggggaatctattttttttcacagttattctgagaagttagggaaaagtcttggtttgtcaaagacaaacctctgtcaaagagagaccataatccaacatgtaaaacaaaacccagaattcattacttaccaaagtaagagacagctgtgttaagcatagtctgtgagtgaagcagattactgatctttttgggaaacatagtggtgttttggttacagaggcatgagtggttgaacttgaccttagaagcatggctatttgagtgagactgttgttgattgagaagcatgttcactgcagtgtgtctgctgctgatttgctgaccttgaatcgtgtgaagctcattgtaattggcttccagaagtgtgttcctgaagcaagttgagttgtcattgatgattagtctgaggtgaattgccctcaatcaaacaggtttaaaagttggtgctggtggttactagttaccatggctattgaataatcaatctttttctcaccagtaatacagagacttttattcttacctcagactgctattcttcttagtgaaatgaagttgcttctgcacctcaattcccattcattcttcaaacatcatcatgatgatgtgtagaactcctggatcagttcattgttctaatcactccataaatacttgattgtttatgatttccagggattagactaggacttcccaaaggtagacccctttggggttgaaaaggaacccaaagcttgataagactgtggaaaatgttgctaaacatcccttctacatccccatctctatttgagttaaagttctgtttctggtgaagcttttgcggacttctagctcctccagatttctgtttcatattttgaactgtatcactcacttgatattcttttaaccattgcattctattgcagaggatttaaaattagacttaatgtgaagtctcggctagtacctttgctgtgtgaccttaggcaaatcacttattctctctgagccccagtttcctctttagaattgaggatatctatgattacccacctcagtcaagtgttgagggtcaaataacattcaagtgcattataaactaaagtgtgatacatatatattttggaaacattattccttagggtgtaaagtgtttctttcctagtttcttgtacatgggaggtactgtatcaatacttgttaaatgaataaattggtcagaatatgccctatcctggaaattaagaatgattcactttcagggttttatagtttgctaccaaagagagctgagttaacagagtggtttgaacaggaaccaaaaataggactcactgagtttggtcctgtcattgggataaaggtattcctatttaggatgaataaatataagtctgacacttacagtcaaatgaggaattggtgacttccattattctttttaaaataagcttttctttttggaacagctttaagtttacagaaaaattatagagatagtgcatagagttcccatatatcataccaccatttttccctattactaacagcttacattaatatgatacatttgttatagttaatcagtattgataaatttttattatcagaagtccatacttcattcctatttcattagtttttacctaatatcctttttctattacaggctaccccatattacatttagtagtcatgtctccttaggctccccttggctgtgacaatttctcagacttttcttgtttttgactgttaatagttttgaggactactgctgatgcattttgtagaatgtccctcaatttggatttgcctgatgtttttttcatgattacaatgtagttatgtgctctggggaagaagaccacagaggtaaagtgctatttcaatcatatcatattaaggatacataccaccaacattatttatcactgttgatattgactttgatcaccggggtgagataatttgtcaggtttctccaccgtaaagttgctctttcctcgcttctcatacggtactctttcaaagaaaatcacaatgcacagttcacacttatgtgaagagttatgttctacctccttaagggtggagtatctaccgttatctttattaacaaagatgattttcattcaacaaatgttaaaaccaacagtaagtatttgtttaaacaagtagtaaaatactaaaattatttgagccgatcagaaactggacagagattcttgtttaccattattatttatgacttggtttatctagcaaatgcagtaagaaaaaattaacattggagaaagagataaaattatctttttacagatgtagttgttgtaaactaaataacccaagagatgttaggaaaaaactactaagagaatttgataagatggatggatgtaagagaaatatacaataattaatttctttttattattttagcataagccttaggaaagagaggaaggcatttcattcacagcagcaacagaaatcataattacttcagaataaagttaataagaaaggcaaggctcttatatgaagaacaataaaatcctatcttgggtcataaaatgagatctgaacagattaaatgataccagatgttcttgggtggggagatttagtatcataaaaatatcagttttctaaaaatgtttttaatgtatttcccaatagaatactgacaggatttgggggagggggaggagatggtacttgataaaactgtattgtttacgtagaagaaaaaatacctgagaaatcaagagatattttcgggagggaaaggaagtatatgccttattatcagaatatactattgtggcaggtagactataagatgtcccccataatctcacctcctgatattcatgcccttgtttaatcccctctgcttgggtgtgggtgagacctgagactgtcgtctaattaatagaatataatgaagtgatcacatgcatatgactatgtgtgcatgattttattacataagattgtaaagtctatcttgctgaaagactctgttcctttctggctttgaagaatcaaacttttatgttatgaactgccctgtagagagggccacatgacaaggaactcagggcaatctctggctgacagctaccaagaaactaaggccctcagtaaccagcaagcaactgaatgctgccaatagtcaaatgatctgggaggcagattcttccccatttgtacctcagatgagactacagccctgtctgatgctttgatcgaagctttgcaaggccctgaaacagaagactcagctaagctgtgcccagatttttgacccacagaaactatgagataataaatgtgttttgttttgagcttctacatttgtggtaatattgttatggagcaatacaaaattaatacaactctaaaatcaattcaatatgatgtttgcttagaaatacataggtcggtggaacaataaagaatccagaaataaattctagtgaatatgatttaataaatgaaaaggagcattcatttcagtgagagaaactagatttaaacgatcctgatactacgggatatctatatgtgagaaaataaaattggagccctcacttagatgatatgaaaacttccaattagtttaaatgctcaaatataaaaataaaatcctatgagaaaatgtacataccatatgtacaaattaggagagagactgccttatgtaagctggaaatttggaagcaattaaataaaaaataaatgtggttataaaatttttaaaaattatgtgacaaaaggtacaataaagtcaaacagttgtagtgggataaaaagcttgtcagactattaattaatatactgcttccttcattcagaaagctttgtttaaaaaaaagtctgtttactttctggtacaaacttcttctcaatgtggactgacaacagtttgctgaccagacactggtttgtccactaaccacactttgggaattattgctctagagaagtggtaggcaaacgttttctgtaaagggccagatagcaaatattttattttatttatattgtgggccatatagtctctgttgcaactagtcacctttgccattgtagtgtgaaagcagcatagacaatatgtaaatgaatgagtaaggctatagtccaataaaactttatttgcagccagatttgacccatgggctacaatttgctgattcctgttctaggggatacaactagaaggaaagtccgatccttaccctcaagaattaaaatctaaagtttaatatgggcctattggagtgggaatgaagaaaggctcatgatttttatcttgaaagagctggtaacgcactgtctaataaattaaccgcctgagcacttcaaatgtggatagtccaaacttgggatgtctctatgtgtaaataccagactttaaagagttagtatgaacactgtaaaatatctcattttttacattaattgcatgttgaaatggtaatattttggatatagtggtttaaatatactagtaagattaatttcaccagtttctttttactttgaatgtgatttttgattgaagctttgtaatatgctaatttaaagttagatatgtgcctcttggacagcaatgaactgtaagagagagagcttgtggggctggggaatttggaaaggtcacgtggacagagttcacttggagaatgacaggattttgacaagtggttcttggagaggataatgaaggctatcagcagaatggtttctgtgtttaggacaggaataagtttagctgtaataaaaagtgaggcatgcagcaagtctaggtaagtagacataagccttattgtgggttgattgcatgagttagggttttgggcctgctttggccagtaggtgaagactagtccatacttttgagcagggagcagtaactttgggagctacactttgcaggccttatctggaagtagtaagttggttgggttgaaataggaaaagcaagaagtggtgaaaccaggttaactaggtaagaatgaaggtctaatatagggtgacaatgggaatgaagaatggaggacaggggacagctacttcatgatgtggcaagaatatttgtgagagagaaccccagtattctgtgcttaaagagcatggatgatggtgatactctcatgaaaatgcagaccttagaaaaagcgggtttgagactaatatgatgtgttccattttgcatgtgtttagtttgagacaaaggtagatttaaaagataggctggttctcagaagcttgtttgcctatatttttcattgatagaggtggccctaggaaattatttatttttgaccatctctatacttcctcaccctccccaccatctgccatggtcacagttgattgacctggagagcagatctgacctttaaatatttgtttgttgggtgttcagtggaacttgagataatcagccttgtaagatgtgaatggagaagttcttttttaggcattcaaactcaagatattcatgtcctttgtagggacatggatgaagctggaaaccatcattctcagcaaactatcgcaaggacaaaaaaccaaacaccgcatgctctcactcataggtgggaattgaacaatgagaacaatggacataggaaggggaacatcacacaccggggcctgttgtggggtggggggaggggggagggatagcattaggagatatacctaatgctaaatgatgagttaatgggtgcagcacactaacatggcacatgtatacatatgtaacaaacctgcacgttgtgcacatgtaccctaaaacttaaagtataaaaaaaaaaaagagacgtggttggtgtaggggcagaaggagaaagtgacccagagaagtagcagagacatgtgagcggtgaacagctggagttggaccagtgaactcctggtcactagactgtgtaggcccctggacagctctactgtagcccatgcttttcccttctggcctgaagagtggcttttcatagttgggatgaggcctggctgagtgggtatgattcctagccacctcatttcctcctctcttaaacccccttggctaaccaaaatgggtgatcaggtagatgtttgaagtggctagaaaggcaggattggaattaaaggagggggttggggtggagatacaaagttgtgaaaggccatatgttcatttaagaggcataagatagtaaatggtattcttttcaactgcacagtaagcccagagttctaaatgcagttaatgctgagttgcttgctgataataggtgtaataggtacagcaaagcatttggccggcagcattaatggatgcctacgattccagtagagacttgtctaagggataaaggttctcctacagggtaagagcaagttacttattaatctccttaacagctgctgctgtatttgggaagggaggctgcaggttgttttagtttatatccttcagagatgttttgaggacaaacaagtaactgcttggtatgttgtgtttttcaaaagatagccctggtatacagaggtggtagctagcctgagggttatgtaaatgacttagaacaggccgctctttgagtggtgcctcaatgagcactttggggggcttttttctcatctagatgacaaatggaggaaaggtacacttctccacatcactggaaattcagtcttttaaactaagatgttagaagtgaactctgagatatagcatgctaataattttgagagaaaaaaatacaggaaaagaaaggtacataagtgaatattgtactaaaaacgctgttcaaatgagctatctacaaattacatatataagcatatgtgtacatgtatacatatacacatatgtatgggtgtacatatgtgtatatgtattatgtacatatatgtatacatatgtgggtgtatatgtacacacatatacataaatatatggcaagccatttttgtaaagaaaacaatgcatgtaacaaatcctgagggggatccacatcaaatgttaacagctgtggttgggtgataagacaattaatatactacttctttctgtgtgcttttcttttccaaggtgttttccttcttttatatataacatgaactactttcataatgaagagaaccgttaattcttttttaaaaaatcagaattactctggacattttctagtatataattttatgtctcaaaggtagagtgcctttattttttaccacatcatctcatttgtaatgtagttcattaacccagtgcattttatggatttgattaaattaatgcaaggccgggcatggtggctcacacctgtaatcccagcactttgggaggctgaggcgggcagatcacatgaggtcaggagtttgagaccagcctggccaacatggtaaaaccccgtctctactaaaaaaaaaaatacaaatattagccaggtgtggtagcatgcgcctataatcccagctactcaggaggctgaggcaggagaatcacttgaaccttggaggcagaggttgcagtgagccaagattgtgccagcctgggtgacagagcgagactgtgtctcaaaaaataataataataataatgcaaagcaaaaatgcattaacttgatttttaagccttgtctcttcaaaataaagaattttattttgttcctattaggcatttaaattttttggtgatgtatttcaaatgtaatcctaaaacagagaacgatatgataattttctgtgtatctactaactaaattgtgtatctactactacacctactagatagtagattttggcattatgccttatttgcctcaggtattcagtttttaaagaaatatgaaaaatttacagttgatgcccctacatctcctcctctctgtcataaattcagagtttatcagttgggcttatttttatacacatattaacatttacatatctataatgattatacagtattttcatattttaaaactataaatgaatcatgccatgcatattgttttgaaacttacatttttgctcaacattgtttaatatgtttccatgtcgacagacctggctttagtttagaggctggcaaactttggcctgtgagctaaatctagccagccacctctttttgtaaataaactttatgtattgtctatggctgctttcacaccaaaacagcagagttgaatagctacaacagagactgtatgacccagaaagcctaaaatatttactatctggccctttgcagaagaagtttgccaacccctagtctagttcattctttgtgagagggtctccagtgtagcctattgaacattaaacaatttggcttttatatattttgtccccgttttccatacttagcaaaaaaataaataaacttaaggcagctatgggctctgttcctagatgttttatttagtggttttggagagagaagatacttttattcttgatttagtttttctcaaagtggattattattgcttgaagagagaaaagggctgtgtggtccatgtggagcaaaatgagagttatgaatttttctgtcagcaacaaaggagtaaccactgcatgcagttaactgtcttaggttattgtgatgttgttactacaattaatagctactactatgatcactgagcatttagtaaaggtcaaggatagtactaagcactccacatgcattatcttgtttattccttgtaacagtctattgaggaagtaattactcctcattttgagaggaggcagctgaggtccagagtgtgccccaaggtcgtgtttaaagtgaggtttcaacttggacctctccagccccactgagcccagtgcacgattccaggagtacagttctctggggtaaacctttgaagagatgggttagagggtactctgagaatccctgctgccccaagggataaattctcactgactccagccttggcttctaaaatctggccaaggcttgatgcacaagggagaagcctctgttttccgcaaaggtcaaagtttacaactgtagtggggatagttattccacatggctcctttgtagaaaacttaggccaggtccatcttgtcacattttttgctatcgtcccagctcaaaactttagtttctcaaggtttacatatagtggatgctggagatggtccaagggaccttaatgtcaggcccagtgctcttgcgagcaacttagcaactgctcattcactttcaaaggtttgactcttgtgttagtcggttctcacactgctaataaagacatacccgagactgggtaatttatgaagaaaaagatgtttaatggactcacggttccacatggctggggaagcctcacaatcatggcggaaggcaaaagaggagaaagacacatcttacatgcggcaggcaagagagagagcatgtgtaggagaactccctttataaaaccatcagatcttgtgagacttattcactatcacaagaacagcacgggaaagacccccccctcatgattcaattacctcccactgggtccctcccacgacaagtgggaattataggagctacaattcaagatttgggtggggacatggccaaaccatatcaaatctataaatatttcttctcccctttagtttatggctgctgtgggtaagacataagaaatcttgaagactttcatggggatagatagtcttttcactctgtcatttaaaacaaaattaccttgtgcctaaaactctccaaattgctggctcagacacctgggtattatttctcctgctgctgtgaaatatagtaagaatgtgaacttgcctcctatggctataagcccccaaccactttgaacaagacagaagccaaggcattaaaagctgctggagatgcagggtttacttttgctttgctttaaagaaacaaagctgaaagcaatgggaatcttcaggcattttcccatgagctgacactagctagacacagtaatctgcacacggacacacaggtaaggctcattggcacatggccaagtaaaagtttgtcagctgggatgatcttgcctcctctacctgaacctgctttcagaaaataatttgaccagtcacgtatactgcctatgaatggtaacaggaattcctgcctgtatcaggataattagctatattacctctggtgagaatttaaggtattagcattggagaaagtctcgttttaaaaaagaaattcctcccaggctgttaaaattacatcctatagatggacctctttttctgcttgtaagaccagctacacgccaacatcaatgacaataatttatcatatgttacaaatacaaagctcaacacaaaatgtttcttaagttatattagttaatgcacatgtattctacttctattactaccatcacaccaaactgagataccattctcctgtcccagatctatcaagtggcagaaggaagtgttatagaccctggggtctaactttaacagacctggcttaaatcgagtgttcatttgtaaccatgtcaatatttttccaaccctgctttggggcctctgacctccctttgcacgaggtctctatgattgtaaaggtttgactaataaggattttggaggatttgtattttaaaaacaatctatttgtaagatggggcattgatcagatagactgagaaagctgcattcagattaagtctaaatttagcagaatgtgtaaagttgtgttaccttttgtgtgaaaagtaaccccctacacctgctccagcaattaaagaatggagtttgtctttcttctctcactcctgcctctcacaaatcttttcttgtgtctattgtatccagttgcctcaactataaatcctaggttttttctttcagcctcattgacatcccatgaatcaccaagccgtggtgaatttcattcttagattaaattagtagctcttgcatccctttccttcttttcatctcaccactgttttttcattcacttggacctttacagcagtttcctggttttcctacctctagcctcattttatcccatccattctgttgaaatagttattttaaaacaatctcataaagccagtgtgataaaattggtagtttcatgttatctacaagactaagttcaaaattccatgcatgtgctgataaaagacccattatggtcctcactgtacttcctccccattttttagctttcattctggtcaccagctctagttcctctgcttagcgaatctcgcttgtcttcaagatttcattcaaatgtcacattttgtgggaagccttgccttttttgacacgctctccctgccactctagagtcattttctttcctttataccttctttgaactttgcccatccatcatagtactcatgttgtatcgtaatcatttgcttacctgtcagccttcctcaattactcatcgcatttattcaagaaatatgctagaaatattgagtgcctgttcaaatccagatgctgagatttaattgtgaataaaatgaacaagatgatctgtcaggaagggaggaaaatagacaataaacaagaaaataaatatgttaacttcaagcattgataagtgttccaaaggaaagagttcacgaggtgctggtgtgggagcctacttgatagagtcatcacagaaggcctctctgaggagttgacatttgagctgagtactgaaggataagaaggtccataatctacaattcagatgatgcagaattcagtgttttttgctatttgctgaccattgttaacctgatcgttctagttattgatatctgctgaagcacgtaacttagaagtcagtttatggttttggtttgctgtcactctccctgcgttgacagcatcgccagatttacctttctaatcaattattttagcatgaagaaacataaacctgatttttttttcttttttttcttttcttttttttttttttttttttttgagatagagtcttgctctgtcgcccaggctggagtgcagtggcacaatctcatctcactgcaagctccacctcccggattcatgccattctcctgcctcagccttctgagtagctgggactacaggcgcccacccccatgcccagctaattttttgtatttttagtagagacggggtttcaccgtgttagccaggatggtctcgatttcctgacctcatgatccactcgcctcggcctcccaaagtgctaggattatgggcatgagccacagcgcctggcaaacctgattttttttaagggagatatataaataatgtagtagaaatggaaaaggactgttttagataacgtccacatgggcattattaaaagatggccatgatttaaagcacttcattgttgatgcaattgtgattgggatgaactaatgaaattagggtgggccattctgccatttcctgaaactcacatgatcctttatttctctcttctttttccttatatctaaacttgaaaatttctccactcatttctcttatccaaattgatctctcaaatcatctcaaacgtgtggagttctgcttttcctagttaatgttattcaggtgtggacttgcatatgtataaatggttgtgtgtcttttttgtgtttgaaagactctttatgttgtgagagatgtgtaaaaggctgcaaaaatatttatgtacagtttagagaataatttaattaaaaatcacatactcacacagttaatctcccaggttaagaaagagaacattgtcagtactcccagaagccacttcagttcccctctccctctctatcatgttctcctcattcccctcttccctttcctgagaaactccatacaaacttatttaccatctccttgattttctttatagttgtaccacctatgaatgaactcttaagtggccaaattcttttctcttttttggtgtatttttgaacattatataaattgaataatactctttgtattttgtaacttctttcacttaacgttgtttgagatccatccatgttgctgcttggaggtatatttattctttttcattgctgtagagtatttagttatatgactataccataaattatctgttccattatcggacatttgggtggtcctcaatttgcttttatgaataatgctgctacgagcactcttttctttcctgttgaacgtgtgtgaagatatagatgcatctttaacttaatatgtaactgttaaactggttttttaaatggttgtatattggtgataattctagttgtctgcatcttcttcagcacttcctcttattaaacttctcaatatttttccaatctggtagatgtgctttcaatttgcattctctgggtaataatgaggaagtacatatttttgtttgttgcccattcttatatcagtttctgggccatatttcattttcccataagaggcatcttatttttcccctaacttctataagttgaaagatttttgattaataaattacatttttaagaaaattttttatttctataattcttggaatttttatataatatgtataaaatatttgtatacagataataattttaatacaatacaaaatatgtaattattcaatggatgtgatatagtttggagatttttcccctccaagcttcatgttgaatatgattcctcatgttggaggtgggatgtagtgggaggtgtttcgatcacggaggcagatccctcattaatggcttggtgccatcctggtaatgagtaagttcttgctctgttaggttcctgagagttcctgcaagaactggtgaaaaaagcgtggaacctttctcccctctctgttgctccctcttcttgctatgtgacatgggggctccccactgccttccaccatgtgtggaagtagcctgagtccctcaccagaagcagatgctggtaccatgtggtaccatgtacagcctgcagaaccgtgagccaaataaacctctttataaatcacagagtcttaggtattcctttatagcaatgcaatgcaaatgaatgaatacaggatcactcatagtgttctgactgatcttgtttctttgcttctctgaatcttgcagcttatcaccaccaactggaatcttggcctaggcattttcttttaagtcctaaaaatgcccagtgagccttctttactaccttcaagtcccctcagtggctcagagacctggcattggactagatggattactcagatttctttcaaccatcatttatgtgtctgataaagtattgtgtcttttgcttcacctcagtttgcagaattgggagtttttcaatatttgatatcaggaaggctttgaatatttttcatctaatttcttttgggggttatttccttggaatatattcccaaatgtggaattataaaacaatgtatttcttttaacctggtatgtcatatgttaggagatgaaaagattaaatgacctatttgcccagagtctgtcccacacaggggcttatttaaactgcattttgttagtttaatgagtagtatagatttttcttttaatttgactaaatgttgaactcagggacttgaatttttaaaaagccgatttcttgaaaaatcatttattgaaagtctaatgcatattttcattatgtcctcagagtatatgatcaattctttaattcttctgtgttctactggaacaaatgaccaatttatgaagttgttgagagacttggtcaatggcaatgatttatggctacaaaacttgagacatgagtataatgatgactcctggaaaaatgtacttgagatgtttccagattagcatgtgctctttagctatggaggaaggcattgatcatattgattacctatatttgaaagtgtcctaaataacccctcagccatgaatattcttcattttttccctctctgccagtttgttacctttcaccaccagccttagctgactttacataataggttttgtaataagtgtctaatgcaaaagttttcaactgggggtggttttcccttccccacaggggatatttgacaatgtctggaaagatctttggatgtcacaactgaagaggaaaggtgcaactggcatctagtgggtaaaagccagggatgttggttaagtatcctacaatgctcaggatggccctgcacgacaaagaattatgtggcccaaaatgtcagtagggctgagactgagaaaccctgttttagtggaaataagtttttatctttccttacattttctccccattcactgttattttcatgttttgtcagtgaattatcagttcacatttatgatctgtggagctctaatatgattgtttaatctgctttgttgtggagagtctatatatgtacacatatacacaataaaatttgccaattttaagtgtataatttgatgagtgttgacaaatgcatacagttgtgtgaccaccatcataacagtgtttgatatgtttaaatttcatgtagtttccaatatgcattcattaaataatattatattctaggacagaaggaaacctgaagtaattcaggtactgacaggtagcttgtgactgataggtagaatatacatggtaattaatgaaggataacacccttgaactgacttctgaattttaccatattttaatattaatctaaagattcttaattttacttggacatgatttgacccctggatgattggctgagaggagtttctatattgtgaaacaggaaatctatattaacatctctcataaaatactgagttttatgtccacaaattcctagattctctttgcatcttctaggtcttttttattcctgcaggtataaaacaagactgagtgtttgaagggaaaaacagaatatatacttctttcctaaaggataatttccagaatgttggttgctttggtagttgaatttaaccttggtaagtagtagcagttgtctgcagtaaagtggatggaaacccttgattccattgctgaaccaccttcttagagtgagaggtttgtcttgaccactaattgctataattggagcttgagagatggtttgagatgagtcttgaaatgataagtgtgtctatctgcttggcaggtgttttctctttccttttaattccctttccaaatcaaggtggtatttgtagtcaaggtttcatagggagtttgctaatgcgtctctaggagaaacatagaaaagctagatagaagggtggtctaacttgatttgtgtcctcatcattgtggtgtaatgagaatataccaatttttgcatgatggcaaaaaatgaggtaagcactggagcactgaaacatttagaggtatttaactacatcttaatactataggctatggctcagaataaccataggaatcttgctgtttttatttgtgggtttattttaggcaaactatcaacagtgctgaaatgatactctgtgaaaaggaagaaagaatgtacccacaaatttaaaatgctgtgcttgctggttttcttctcttagccttatccatcaatcaagaattgttggagaaaagtcacgttgaataattctgccagttccactatgtaatcttgggatgaattgtgtcgctctgcatggtaacctcagtatttcataactgaggatgaaaatggtttttcaacttgagaaaaatcaggactcttttggaacaatatttcaaattccaataaaagactattttttgtttggatgttcatcctctgtcccttcttccttagcctcttagcccaaggtgctatttttatgtactggcagtcgagttccagaagtgagtgtcttatcctgaagtgctattttgaaatggccttattctattttttgaaagaaatgactaataaaatgatcccagtttatcattgtaatggactagaatatgaacaaaaacctcaggcatttaaattcccatttgtctctactcttcttcactgcgtactcttctactgtttactttcagcatgcttcttgacatggaagccattttgctaatggatctgtggctatttcaccccaggtcgcagccaggttagcattagaaggatggattggattttctgagttcagaatttctatttggtattgctcaagcctttagttgcttagccacttcaggccacaatttggtgaaagagcttaaagagcagtgcaaaactttcaaaacctggggtgtgagacagatttggaatcttgctgtaccagatttgtgtcctgatatttattcgatcagaattttctcgtgtctttaaaaatcctttaacaataccattaaatggccatgtattttttcatcctgaggttcatttatttagcaatttccctactgttgcatatgtaggtgtttccacttttttactaatataagattatgattagtagcacttaaatctttgtcttcgcatttcattatgtgtttaaactaatttccttgtggtagaattaagcatgaatatttttaaatattgaaaatttttgctagaagagctttctcaaaggatgcttaccaatatgcccattaattgtataagaaaatgtgaatcacaacacactcttgccattgacaaagatttttaaaaatttggaatgtatagatttaaagatggtaaatgatatataccttttatattataaggtgaaacttaaatatttgtattttatgaattttctgttcttttgctctttttctaccttctgttagtggtatttgattgtttcattagaatgtttatacattaaagctaccaatccattgtttttgttgcagaaaaccagatttatcattccccccttaatttatgaggtagacgctaaatacattatgcgtttgataaaacataaattcatatatagctatgatgctatagagtaggttgacgttaatttccatttacttctctataaagacctaactggtgataattctaaggtattgtgactacaaatttctggtctgatctggattctacttttctccaacattcttatgacataaccccttgcatttctgcaaaataatatttggtcataatgtattatcctttttatgttgttggattcgatttgctaaaaattttttttgtgacttttttttgtgacattctgttgcccaggctggagtacagtggcatgatcatggcttactgcagccctgacctcctaggctcaggcagtccttccacctcagcctcctgactagctgggagtacaggtgtgcactactatgcctggctaattttttattttttgtagagatggagtctcattgtgttgcccaaactggtaattttgctaaaattttaattagaatttatgcatcaattttcatgggggttgttggtgcatagttttcttataatgttgttgctttttgtaataacagaatgctggcctcataaactgaattggtaagtgttcctttttattctgttttctggaagtgattacatagaattggtactggtcttccttaaatgtttcagagatttcaccagtgaagccatctgggcctggagttttctttgtgggaaagtttttatctatgatttcaacttctttagtagatatagatcaattcaggttgtctggggttttttgagggagctgtggtagtttgtgtctttcaaggaatcagtccatttcatctaggttattaaattttttcagcttttgtatatctgaaaaaatttttacctttgtttttgaaagctatcttttgctagtatagattctaggttgatagttgttttcatttttgtattttgtattaaatgtattggcataacatttttaataatattctttgattatgcttacagtatctgtagaagctgtagtgttgttacctttctcagtacttacattggtaattcatgtcttccctctgctttttcaaatcagtccaactagagatttatcaagtttgattttctcaataagcaagttttttatttcattaatttttctttcttgttctttcattgtcttattgtattgattttagctctgatctcattttgttccttctacttgctttggaatcagttttctcttttttttctgatttctgaaggtagaagctgaagtcattgattggagacctttcttcttttcccatatagccattcaatgctataaatttttccctaagtactgttttagctgcatcccaaaatttttgatatgttgtcttttcattttccttcagttcaaaattatttttaatttctcttttgatttttttctttaatccgtggatgacttggaagtgtattatttcattttcaaatggagatttttccagagatctttcttttattaatttctaaattaatttatttgtgggaagaacatactttgtatgacttgaatcctttacagatttattgggttttgtttaatagccaagaatgtagcctatcttggcagatattccatttgtgctagaaaagattgtgtattctactgttgttgggtggaatgtcatgtcaacattgataatgtttaaacctttcatatccttaactaattttctcaatacttgttctatcaataaagagagtctttttgaaatctccagttataattgcggatatgtctgtttctcctgacagttctgtaagttttgctttatgtgttttgaagctgttctgaagcataatgtttaaatgtttaggattgttatgtccttgtgataaatggagccctttatcattatgaaataagcttctttatccatgttaatattctttcctctgaaatgtattttgtctgatattaacataacaacataaccactccagttcttttttgaatagtgttagtatgtgtattaatctgttatcgcactgctataaagaactacctgagactgagtaattgataaagaaaagaggtttaattagctcatgtttccacaggctgcataggaagcatggctggcggaggcctcaggaaacttacaagcatggtggaaggcaaaggggaagccagcatgttctacatggctggagcaggaggaagagagtgaagggggaagtgctacacacttttaaacaaccagatctcatgagaactcactcgctatcatgagaacagcaagggggaaatccgccttatgatccagtcaccccctgtcaggcccctcccacaacactggagattacaattcaacatgagatttgggtggggacacagagccaaaccatatctcttcccactccaaatttaaacctatttgtacctttatatgtaaagtgtctttcttgtagccagcatgtagttgacccttgctttttaatttaatctgacaatctctgccttttaattgggatgtttagtctacttacacttaatataattgtttatatttttaggttcagatctattatcttgccatgttttctatttgtcccatcacttctttatttcctttatctcctttattttttatttttatgattctattttatcttacctgttagcttattagctataattctttattttgtgcttttatttgttgctttatggttcatagtatacatatttaacttatcaaagtctaccttcaagtgatagtataccaccttgcttatagtctatgaaccctgtgatagtataaaatacagccatttctccattcctagcctttttttctattgtttaatacattttatttttatttctttttaatttttgtgggtacattgtaggtgtatgtacttatggggtaccaccacactccattgttatttttgtgtagtcagttatattttagatatttaaataagaaaaaataattttatattttcccaagcagttatttcagtgcccttcattcctttacatagacccatatttatatctaatatcattttctttcttcttgaacaacttattttaacatattttatgattcactgataattttttcagcttttatatatctgaaaaaatctttacctttgtttttgaaagatatttttgctagtatagattctaggttgatagttgtttttatttttgtattttaaagatgtttctcctagatttttttgcttatattgtttctaatgagaagtatgtcatccttatctttgttcttccatatgtaactttttttcccctctggtggtttttaattttttttcttaatgatttttagcaattttttaataatatatcttggtatagttcatgttttgcttggggtttgttgagcttcttgaatatgtgggcttattgtttgcataaaatttagaaaattctgaccattaattctataaatattttttctatcccacccttttgtggttccttttatggaaggatggtatttagaaactaggggctgggtgctaggtatgtttgttgccactggagtgtcattgcttcttggccctagcaacagctaggaaatatacttgagtgtaataactgtgcaaacacacgtctatatttatctgctatgttttaaaagtttgtcccctccgaaactcatgttgaaatttaattgtcattcagtattaagaagtgggacccttaagaggtgattaggctatgagagctctgcccccataaatggattaatgctgttattgcaagaatgggtttgttatttcaaaagtgggtttcttacaagaggatgggtgttgcttccttttggctctctcttgccttctctttgccctttgccatgggatgacacagcaagaaggcccttgccagattccagcaccttaatcttggatttcccagcctccagaaatgtgagaaaataagtttatgttttttataaattatacagtctcaggttttctgctatagcagcacaaaatgaactaaaacattttctgagtttctctttttctatccatctatttatctgtccatctattcattcatctataaaaactatgagttcatactgaaacctctgattctaatctaataccacatggttcattatagccttctttctctgatagtgagaaacctggttttcattatctacaatatatgtaaacatgtgtctgtatttctttaatccttgtagacatggagtattttcagaactgctaacctgtacccttgtaagaaacacatttactaactagagtagttctgggtactgtttttttgtttgtttgttttttgtttttttgtttttgtttttgtcttaaaatgcagtagccagtagccagtcatgatgctgttttatacagttaataaggttagttcttttcttccccactctcttcattatggttacattattcacttgtgatataattaggttctttgttagtgtttatattccattttgtccccttcccccaaacacactgggtgattttattactgacttatattttcagtacattaaacatgacaatgcttctcagagtcagggctatacaaaacagtatacacagaagtgacatttcctttttgttcttagcaccccttcccatccccttgctttttcatccctttctctattgccttagataccaatatctttagtttctggtttattcttaatgtatttattttgcacaaatgagaagatacatgaatgttttcattcttaaatgaagggtagcatactacagatacttttttgcactttgctttttaaaaatgtttacacatttatagaaatacaataaaatttgtttttatgcaagtaaaaattgtctatattcgaagcaaacaatgtgatgatttcatatctgtgtcattgtataatgattgccatggtcaaattaattaacatatccattatcgctcagagttaccattttgtgcatgcatggagtgggtggcggtgaggacacttaaagtctgtattttgccttttttacttctaacagtttatcctacaaatcatttcatatcagtttatagagatcttcctcttccttttttttatagcagcttggtactccatcatgtaactgtatcatagttaaccattctcctatttatggacatttaggttgcttccaatattttgtaattgcaaactatttttaacgaataatcttgtacatatgtatttttttattgggggtgctttcttagtgcagattcctaaaagtgggattcctgggacaaatagttctttttgtccctccatttgcttgaagaatttctgatgtgtatcagaaaataacaacttttctttgcatttcttttctcctatggttttgagcaaagcaaaaacaaatttgtacaggaatatagatgaggacattttccaatgtgtctattgtttcaagtacactcctcctaatatctaacttttatcccttgagcattacatttttactatcatctctgctctttctttaatcatttcttttcatataactcattacatatgttctgaaatgttctcaattcatagcttgagctaagatgtgatgtcctcatttgaagtataattatctgcattttgcctttttgttgtcagatttaaaaatacaacaaaaacaaggttacattagtgagaagaagtcaaatgaagacagttattttttctccttaattgcaactggtaccatgtgtactgaaataaaattggtataaggaaaataaaacagctatgaacagtcctcaagtagcatggaaaatcagacttgctcaagtggtgaagaaccctatgtttggtttcaaatggaactttgaattgttaaatttaaattattaaacacaaactatcaagttggaatcagtggcctgaaagaatcagtcttgagtgtcccagaggcctttcttactttctgccttctacaattgtctgcccctctgcagtagtagtgaacacagtcttctttttatctggtttgtggttatttttgtagctctacaaatctttgtgggagactaacgttcctctgaattatatcttaaaaatcaaatttccactggggcatttgcatcaaactgctcttcttgctggctctttagtgccagatttccttccaaaatgacaggttgtgtgatctgtgcttctactgccctttatttcacaaagtagtctttgatgtattctgtgtatctgggggtaagagcatagaggcaatgagaagcaaatgcctttatctgcagataacagcttcccttatctgcatgttaaaatggacaagtggtactttgcccacttgtgtgtcagttgcctgcaagtgaagcattctgtatctttcagatgactgtttctttacttccttaatgctgctaatggtcagttgagagaagagaaaaatactcccaaacctgagattctatttggaaagcagtattgagatcctaattactttgttttattttccatacaacactaatagacttaggcagtaaaatcaatggcattgtcacttctagactgctttatatgtggaactgttgatattctgaaagtttacttactttttagtatctaatatataaccttaaactgaagtgctttttaaaatctaagtaattatcatctattggacgtaggtctatattgaggctgataaatttcttgggggagcttgtgatctacacccttgctacccgaagtctgtgcaacatcagcatcatctgggtgctagttagaaatgcagaatcctcaggtctcacctcagaccttctgaaccagaagttacattattcacaagttcccaggggattcacgggcacactaaagtttgagaagcactaccacagaagatgggacatttgtttaggtgtttaggaatcaggccatctagaattcattcctggtccttttcattctttttttctgaaataagaacttgctgctcaatttttcaaagctttggtcttcttatatttaaaacctgatttaaaactgagctttttccaggctcatggaagatgagcaaaggggtcatcttgatatgaagtctgagagacacttttgaactcattctggaaaagaacataactaaaagtttggcattgttactgactttctctgtccacctacgaaagtgctttttgaggcctcaaggtaggacatgatctcttggaaatatagtcaattctcataatttgtggattctatatttgcaaatttgctgacttgctagaatctattactatttgtaacccccaaatcggtacttctggtgcttttgctgtcactcacagacatgcacagagaagtgaaaaaatttgagtcacctgacatgcacattccctgttaaagtcaaacaaggcaatgctctactttcttatttcagctctcatactataaacaagtatttttttttgtaatctatttagtgctgtgtttttcctgatttttgtgctttatgttgttgattttggtgtttaaggtggtctttaactatagtgctgaagggctgttcagtgttcctaagcacaagaagcctgcgatgtgccttacagagaaaatttgtgtattagatgagcttcctttgggtatgagttagagcagtgttggctgcgagttaatgataatgaaccaaaaatatatgttaagtacagtgtctttaaacaaacacatataaaacaaggttatgtattgattaggtaacaaaaatgttgtgaccagaggcttgtaggaacttactcctgtatttcccctaggagcaatggttcagtatttgttaattcagtctttgtggtgacttcataaaacataagtgctgtgaatattgagaatgaactatatgtttaaaacacaattagactaagatttcaactgggtgtcacattttctcttctgtgggtgataacaagattagcttgttataagaaattttggggttgtattctgtgagtataatttcaaataataataactggtaatttatgaaaacatacttcagtatttggaaggtttcttgggatggaagcgatattccagagaggcttttctcttcctatgggcaactttttattcttttaggcatggcacttgaaacaattgtactgcagttacttttagaccaccaatgtgtatgttaagctcattttttgttgagtctgtgtcttctttttggtcaactttgctgcataaatatcacagaaatctgtgtcctcctctcctgtatccatgatccatgcagctgcttcagtccaggtccacatcacgtattgcttggatcatagactagtattctaactgttcttacccatagcccactctctagtgccacccattttgtagtatagtaaatctgatcctatccctcctctctgtgaaatctctatgtggctccctgggataaagttgctttgggacaaagttcaagatgctctaagttttaactcttgattttcttaccaccgtgcttggagacctctgatcacttgataactctcccacctctgtgcctttgcataatgtccctctgtttagtataccctttttttcttcttcttctaccaggaagttgattcctgggctaagactctgcaattacctcttgtattattgtagatttttaaaattattatttcccccctccattaggcagtgagaactttgaggaaaaggaatggttttgttcagcttggtgtcactaatgccttatatcttttataggagtttctggccatgagatcactggaaatgttgaataaattagaatttgggggtgagtctaatttgactactgttataacaaactgactttggattggcagccctaatctgcaccagttctaatatcactaatctttaagaaaacccagtatagaacccataatgagcattcaattttggaaaatatgaaaaaaggaaagtgaagaaattagttataaagtacaataaacacagtagcaacttgttatatatggtcaattgttttaaaacaagtgatgcttcatataacatttgtctgcttaagaagtaacaaaggtaaaataaattaatgcaatgaagtattcatactctaaattttactttctgctttccctgattcatacaatgagtagtatacagcagtagaaatgaatgaattattgcaatacacaacactgcggatgaatcttattaagttaaagtaagtcacccaggattgcatgacaggaatatatcaaagatcaacacaacacatggttcttaatagtggctatcctgggatgagggaggcaggggaaggaaatggagatcactacatagggagatgtaagttattatccatgttctagtctcttttgggtagtgggttcatgtgtgtatgtgcatattaatataataaacacaagaatgccatgatgagtcctcatgaatcaaggattttgattaataggatttatctaattctcttcacccaagttccacacttatttaaaaaaaaatcttatttggaaattttaggggagcctccacccctttatcctctcttgaatgtgaattaagcacatatgtaagaattgtacatattttgtatgggaaagaaggggaacaaaatgaccaaatataaaatgtaatattaatggtgaattcaaagacaataggcattatgaaaatgagaaaataatgggaaaatcacacaaatagccagccttttttgagtcaatcaagtactggggatgtggagatgaattgcaatcaggtttaatggagtcccccattttgcagtgcttgtattagcttgccctacattttcttggcagcaggaagcaagcaaagggcattattcaaagaaaagcaactgtgcgagacttgtgagaaaaatatgcatcctgtttcttccatgttgcatatcatagaaagaaagctttgccttccaattttgtgagaaatacccttcatttgaaaatgattttgttttacatttctcccaatagcactcccatgctcaatttcttgtcaatcctctcttttctgctagaatccttgaaatctctttctagtagcagttggtgcaagacaatgtgcatttattttggtggcagcattttctagttttcctgccagaatgtctgccttcacaatgaactagttttaaggcactttagatttcagctgattcccagtatcagatgtgaacagacaaaattctatctgagaagaaaatctctttttaggcagaaactttagttaccctcttggcagagtccagagagaggaatcaagggttgcttggattctcaagtcattttaaaaaccatatcatgagtatcttcctgtctccttggtgatatgtgaccgttttcctcctggaagagctgttccatatatttttagtaacagcaggagaggatagatatttgggtgagctgtgtacccagctggaaagcctaaacatacaaagggtcttaagtttcccttgatcttgtttttctccccaaccccctacattctttttttgtaaagcacagaaatggaaggcccacttgtgaaaagcatctcacttcgggcttactgactgccattcacttctttggccctttgttctgtttcttctatcagcaagggaagcacgtaagctctgccagctgtttgtcacttccagagatatgctgtttctgtctcatctgtccagcccagctaagagtggaatcttacaatttgacaacctataaataggagggatgagagggtataatttagcaatgttttttgttttccaagcctcatttctcttgcctacatagctagcaagtgtcatagacttattgcttgattgaatttgggcagtttctaacaaaaagtgatgttcttttcttccaataagcaggaaggctgctttatattctttctaatagcaatgggcattacattagcacctctctttcaaaatcacatacccagggctttgaatgaactgtggctttagaacaagattttttgagaaggtgggagtggtgttttcatgaaataggctaatttgtctgtttaagccaaactgtgacctcatgaacaccatcatccaaggaatcagccagcattatgtacacattagattgaattctataaatttcccttcatatagggaagtcccttgagtagacgttggtctgcccttcccaagtctcttttgcagaaggtatcccttcatgaatacctcagcacagggatcaatactacaaggtagagtatagaagaccatgatattctgaaacaggcgtggaaactggatgtgaaaatatgcagttgttaattagtaagcagggatacttcgctttctggaagtacatatcatgtagggtatatcatacagataggatgatattattttgagacttagataatcacataaaactgctcaaacaagagtcaagggagtaatttctaagaacacaatggtagagactgtggtccctgccatggggtaagtatagttgtgggagaagacccagaatagatactctacagatggatcttaaaggctgttttactaaaagaatttccatttaaaaccttgtaaaatttacatgaaataaatataaatgcaatcagtaattatggaaattggcataaaccatctaccatttaatttatccccattgacacaaatatttatcctccatgtttttcctctaacccagcataaaaatgttttatgtttttgtgtgtgttttgaaagatatactggccacatagcacttcattgaactgaattataagatacatctactggtaagggaatgattagctattgttgtataaaaatccatccccaaacttcgcagctgaagacaataatttatttgttcacaattaggcaagttggtagtatgggcttgactcagctgggatggcccatctctgttccacatggtgtcatctagccctcctcatgcatttggaccttagctggggtggcacactacattctctcccatcttccaggaggccagcctaagcttttcacatcatagcagatgagttctcaggaataatgaacaagcagtcttgatgcttctgtctacataacattggcccatgtctcactgaccaaagcaagtcacatcaccaagcccagtgtcattgtgggagggaagactacacaagggcttagatatggggaagtgtgacttactggggttgttaatgtagtcatctcccacagtggaccttttagttgctaaatgcttttaatataatgaaagcaactctactagttgctgtgatgaggtatgagagctgagcatgaaggaaaaccaagtttctgcagtagtatgatgtatgtgctttctgaatgagaaatcatagggcagtatgacaaagggattgttatgataagtgttttaagtataatacctaatcactttttttattcctggaaaaagaatgcatcaaaggcaatgaataaatataaatagactagtctccataaaaatgaactctcatatggcaaacagcatgaataaacaaggaaaacacaagctgggaaaattattgataatagacaaaggcatagtattcctaacaattaacaagaaagacaaatatgccaatagaaaaatcaacaaaggtcatgaatgggatatttacaaagaagaaatataaatatgcacatggctgccaataaacatccaagaaaacattcaatttaaccagtagtcaaagaaaggcaaacaaaagtttctgacaaatctcaattcttgatatattttctttgcacttacataatataaaagcagggtaagagaatggagaggtgggcgggaggagttgcaattttagagaaaacgggcagggaaggtctctcaaaggtggtaacattgaagcaaggcttcaatgcagtgagagcacaggccatgtgctccagaagtgttccaggctgagggaagagtaatgacaaggtccttaggtgggactaagcagtgagaaagccagctagtgtgtgactgcaaccccttgagctgagtattcgggaataagtggatattctgtactaccgaactattcagacagacacattctgtgtgataagcaaaaaagtggatgttacaacccacaaaatgggaaaaacttttgcaaatcatatatctgaaaaggggcttgtatcaacaatatatgaagaattcttacaagtcaatatttaaaaggcaaataattaaaaaatgggcaaagaatctaaatagacatttctctaaagcaagtatacaaaaggtcaataaacacatgaaaaacgcatgatattaaccattaggaaaatgcaaatcaaaactacaatgaaataccacttaatgctcactagaatgtctataataaaaaagaagtgttggcaaggatgtagaaaagttggaaccctaatacatcgctggtgggaatgtaaaatgctgcagacactttgggaaacagtctgacatttccttaagtggttaaacatagagttaccatgtgatccagtaatttcactcctaagtatatacccaatagagttgaaaacatatttccttacaaacacttgtgtataaatgggcatttaggcacattattcataatagctcagaagtggaaacaacccaaatgtccatcaactgataaatggataaataaaatgtgatatatccatacaatggaatattatttggaaattaaaagggatgaagtactgattcatgctatatcatggatgagccagtcacaaaagatcacatattatatgattccatttgtataaaatgatccagaataagcaaatctgtagagccagaaagtaaattagtatttgcctaggactggaggatatggagtgatttgggagcaacagttaaggtatgtagggtttctttaatgttacataaaaatagtgtcttatgaatttaatattttatttatttttttgttgtttttcttttgtatttttatttatttatttatttattttttattttattattattatactttaagttttagggtacatgtgcacaatttgcgggttagttacatatgtatacctgtgccatgctggtgtgctgcacccattaactcgtcatttagcattaggtatatctcctaatgctatccctcccccctccccccaccccacaacagtccccagagtgtgatgttccccttcctgtgtccatgtgttctcattgttcaattcccacctatgagtgagaatatgcggtgtttggttttttgttcttgcgatagtttactaagaatgatgatttccaatttcatccatgtccctacaaaggacatgaactcatcattttttatggctgcatagtattccatggtgtatatgtgccacattttcttaatccagtctatcattgttggacatttgggttggttccaagtctttgctattgtgaatagtgctgcaataaacatacgtgtgcatgtgtctttatagcagcatgatatatagtcctttgggtatatacccagtaatgggatggctgggtcaaatggtatttctagttctagatccctgaggaatcgccacactgacttccacaagggttgaactagtttacagtcccaccaacagtgtaaaagtgttcctatttctccacatcctctctagcacctgtttcctgactttttaatgattgccattctaactggtgtgagatggtatctcattgtggttttgatttgcatttctctgatggccagtgatggtgagcattttttcatgtgttttttggctgcgtaaatggatactggcaaaccgaatccagcagcacatcaaaaagcttatccaccatgatcaagtgggcttcatccctgggatgcaaggctggttcaatatacacaaatcaataaatgtaatccagcatataaacagaaccaaagacaaaaaccacatgattatctcaatagatgcagaaaaggcctttgacaaaattcaacaacccttcatgctaaaaattctcaataaattaggtattgatgggacgtatctcaaaataataagagctatctatgacaaacccgcagccaatatcatactgaatgggcaaaaactggatgcattccctttgaaaactggcacaagacaaggatgccctctctcaccactcctattcaacatagtgttggaagttctggccggggcaattaggcaggagaaggaaataaagggtattcaattaggaaaagaggaagtcaaattgtccctgtttgcagacgacatgattgtatatctagaaaaccccattgtctcagcccaaaatctccttaagctgataagcaacttcagcaaagtctcaggatacaaaatcaatgtgcaaaaatcacaagcattcttatacaccgataacagacaaacagagagccaaatcatgagtgaactcccattcacaattgcttcaaagagaataaaatacctaggaatccaacttacaagggatgtgaaggacctcttcaaggagaactacaaaccactgctcaaggaagtaaaagaggatacaaacaaatggaagaacattatatgctcatgtgtaggaagaatcaatatcgtgaaaatggccatactgcccaaggtaatttatagattcaatgccatccccatcaagctaccaatgactttcttcacagaattggaaaaaactactttaaagttcatatggaaccaaaaaagagcccgcatcgccaagtcaatcctaagccaaaagaacaaagctggaggcatcacactacctgacttcaaactatactacaaggctacagtaaccaaaacagcatggtactagtaccaaaacagagatatagatcaatggaacagaacagagccctcagaaataacgccgcatatctacaactatctgatctttgacaaacctgacaaaaacaagcaatgtggaaaggattccctatttaataaatggtgctgggaaaactggctagccatatgtagaaagctgaaactggatcccttccttacaccttatacaaaaattaattcaagatggattaaagacttaaacgttagacctaaaaccataaaaaccctagaagaaaacctaggcattaccattcaggacataggcatgggcaaggacttcatgtctaaaacaccaaaagcaatggcaacaaaagccaaaattgacaaaagggatctaattaaactaaagagcttctgcacagcaaaagaaactaccatcagagtgaacaggcaacctacaaaatgggagaaaattttcacaacctactcatctgacaaagggctaatatccagaatctacaatgaactccaacaaatttacaagaaaaaaacaaacaaccccatcaaaaagtgggcaaaggacatgaacagacacttcttaaatgaatttaatattttaaaagggagtagaaattagactaattcctttgaaaaatattaaattcttaagacattaatatattttatgtaacattaagtggagactagagttacaaagaggcaggacctagcccaacttggggggtgaaagagttggaaaatgtaaaagataataaaaacaagacatcagttgactttggtcttggtgcccagacgagccagagctacagccttctttaaggtattaggtcagagttttctaggatagtagctgatgtagtaagtgtgatctttttgtcttgggatcctgaatcttaagtccataatattggtgatttacaacctggaagtgatgaatgcaacaccagacacccacccccaacatttctgcatcaccagaagctactgctgtgatccccatgcctaatggggccccctttgtgaagttacacctaaattggagcttgaacttttttccagaggaagtatttttaaatgattagattttttataatgccaatttcattgtaaatctattttgattggacatttaagaccacttataacattgtttaatgaggaaatgtgtccagctttcaaacaaaggatttagaaatgatcttttggaaatgtaaattattttgtgagctagaactccctacatttcagagctcctctctgagtcttggtgtggatgtggagaaggacagcctgagaaaataagataagggactctagttcttcttttacattaatatatagtcaagttcctattctggcatttgctgctctgattttctgggaactactttagaagtctgcgcttagcttgttagatatgatttgcatgcagtcgacaccccagaactcgcatgtatgatgaatttcattaatctagtgatttgtaaaaagagtttgaattaaatgctccttcatgctccagagactgcactgggctgctctgtaatggttgccacagtttctccaagggtagtgatgtaaaaacgaaaagacaactagaaatgaaagataatccagagacctgcaggtacagcattgcagatcttgaaacagaaaaatagtgtagctttatttagatgtctcactgcttttttttcctctctctcgttttgtgaagataaatgatactctcactgtgcttcagcttcttactctataatagtagttttcacttaggtgagcctcaagcacctggagagctagtaaacatgcaggtacccggaccccacacgcagagctgctgattgagtggacttgtggtgggactggagaatctgcaattctaacaagcacccaagcagtactgctgctggtagaccagtgagcacacttttcgtagcattcatctataatatttagaaagccactttcaactctaattttctataattctgtgatttcatattctgacatctgaggcatctgtgtgagaccaaaggtgagcactgacgattgaacttgcccaaccatttttaggactcaccttcttcctgattctgcagaaaccaaaacatggctatgtttagtgtctgcagaaagactggtctcgggtctagttttagccttgaggaaaaaaaaaaaaaaaaggtgggaaagagaagaaacaattctgagttagaattaagattaccaaatgagtattgaatggcttcaaagctgtttcccgggcacccccaaaccctagattcccttgaatctttcctgattcagcctggtccctggtagggaaggaccccagcctttaggaaatatgggagaactggagaaataaagcaaaggggagggcggtggcagtgtggtaagaaataagtcgaagtaaattggggacacttaagctttcagttcctttaaacatctgtttcctttgggcaattcacacttccagaagagttcttgagatgccgtttaaagataaaaaaaagtaatgttacagctcttttagaatttgtctagcaggctttccggtttttaccagaaagcccccccaccaaaaaatatatatatatatttttaaagaaaaatggtgaggtaactgaactgttagcatgtgccaaagttagggtcttgagaacctaaagttttaaaacacttgactgctgactccaatccaatatgggtagccctcacttcagaagacagtatttggttttaaaatgttcagttccactgcctttgttttctggccatttcttagtggataagaactatgtggtaacttggtgccattactgaacttattttagacaactcttgagaaatatgggaaagttgaaaagtggtctgttccccttctttattttatatacatagtattatttaatatatctttattacattttatttttaaaattgtagctattttattcattttattgtgccagccatacataattgaataattaaaaattactgcctgaaagaaaatgtcccacaatcccattaatcaaagataacttcctttaacattttgctgtgcatcattccatacattttttcagtgattaatatccttatttcccacaaaaatggagtcctgctatccaaataacttaaccaccttttcctgataacattatcgcagatattttcccatttcactcaatattttgctatgctacaggaccccattgtatgaatataccaccctctaggtaatcagtgctcttttttgctattaagcaatgttatgatgacctttcttgcacgtgcatttttcacatgagtgtccattacttcctaaggataaatccgtgttagaggataaacactgtaaatgcttttaatatgcagtaccaaattgccctgtagaaatgagcctgtttacacactctctcagcagtgtctgatgagtaatctgcatgtttcaaaatgagctttcattatttttaagaagcgattttgtggcattagagaatttaagtgttggtttttgaatgaaagcattggcaagctgaatgaatttgaagtggtgttgggcaatattatttggagctgtctctcttcacacaacctttctgcagcatttttgcactgccttgataataaatcagttctattattagtggaagacagagagactctgaaatgtttaccatcagccttcctctgtgtttaggagctacgtgtatgaaactatttttcctcaaatactattttatatttatctgtgtagttgaaaagcttgtgcagccaagtgtctgttctcacattttaggactgcattcagttttgatctcctgttttaaatattttttgaatcaataaatttctgtgcatggtgcttggcatgcagcatatatacatatacatatgtatatgtgtatatacatgtgtgtgtgtatatatatacatatatatatgtatataattaaagtaagaaaaatccaaggacctctatctcctacaaggctacagagaactctttgaaaaaatactcctttatcttctaggtgagacagttacatactcatttgaaaataaaaaacttggaattctaaagccgttcttgccaattcctgcaaatatagtgctcagatttcacaccaggttattaacaatgacatggatgtctgaaatgctggagagagggttggacccagcaataaagaaatgtcgctaggttatgttaaattttcctcttggacctcaaaaaatgcccctttggccagagctggataaagttccattataaaaataagaggtagtacaaaaaatctgagagatttttgtactaaaaatgtacgattggcattccaaagaaagtcgtatctgattctgtattatttggggttcttgacagaaactggcttgacagtttatccagcaaacattactaagacatgttctgtgtcatatccattgttttaagcattctataaatatcaactaattaaataccattttgtgatctatgggtattcatattaacccatttcacagataaggaaactgaggcacagagcagttatataagttgtccaagatcactcagccagtgagtggcaaagccagcagtcaaacccaggtagcctaactcaagattctgtgctcttaattacttagctatgctgcatggcatatgtaaacatacacactgttaaagcagtgatggtttttaggaaatgttagcttatattttcgacaggaggaaactggtcactattattctctaatagaccatatttcttacctttgactgcgcattagaatcacctggggagctttccaaactcaacccagaccacatccctgacctagtagctcattcttggaaggtgagacccaagcaccagtagtttttaaagctccccaggtgattccagtgtgcagccatggttgagaagctctaatctgggagaagagtcattattgatggccaatattttatcagaaacatctgatgaaaaagagtactgtggccatgtcttgatacacttcactgagttttctcagaggtgagcctattcacaatggagcaatcttcttcaagtggaggcagtttaagtctgagaaaaattattctttctgaagatgctgtttccagtgatattttagaaaagtcaaggtataaatccattggtgttaatgtaacgtagccagctgtttcactttattagtcaggtgagtggaatataatgctcttactcaaatcagtgcccagttgctttcgattgtctgcctctgaattttgagttgaattccaaaagaggtaagagaaaatcggtgggtagggaaggcaggccgcatctcagccagatggctaaacagcatgagacttgggctgcatcttcagtcctctgtgaatgctgtagaatgacttctttctttctttgactacacacgtaaggaaaatattcagcacatgagaatttggaaagagtttttctgttggagcagcttagtgaaatcgaatagcaagatgcctttcaagaaaagtgacttttagtcatggtggtatgcgcatagcatacatagtgtttaaggaaattgaccaaacatgggtcagtagttaacaataaacatttctgctgcttcatctgaatcatgctgggaaagtgaacctgttgtctggggtatttattttggaattgccagtttgttcaaacaagactaagtcacgttggggaaatggtgagaacaatctcttttggctagacacttcggtttcagaagcctgtcagcttgcaggaatccccactagttgaggtgcattagggcatttctcatggctgtatatgaaagctaattacagagggtcttgtttctgtttgttcctgccataaagtgtcttctagaattgctgttctgtgactgctgtcttgggccatattaaaggatcgtgatggtgggaacagactgtccactgctgttatggggaacaacagagacaaatggtatagattcttgtactctttgtaacataatctgtgacccaaatcatcttataaattgcaaaatgtattgtaaatacaaaagaatgtttagtagatataggtacaatataaagaataattttaaaattctaacgggcccacacccccagtttaagaaatgggaaaatagcagctccttaaagacctttcctctgttccctttcccagttgcataacctccagagataaccactaccctgacttgtcactcattttcttccttatctttttagcatccagagttatgtatgtatccctaaacaatatattgtatggttttgaaaaccaagcagcaagcacaaacctagctgtgcaaggaaagagagacattggttttgtttgatgaaagcccaccaagtctctgggagaaatctggcttctgctttcagagcttattgtggggaagttggtgggtaaagccttgagtgaatctgaggaaaaatgggtctcctgataggcaggacatttgacaacacttagtgtggaactggtactgagcgcccagcaggaatgtggtgggggcacaggctgctctgcgtttcctactcttcagctctttgatgcctgcctccagttctcagaagcctgccttggagtgaaatgagagtcctttgctggttcaggcagtggagaagaacaggaatctcctcagcccacgccaggaaaagcaaaacagaagaagcctcatccagctcaccccatcattgttttcaggtttaacggcagcaggcatcttgtgatgaaagttctcagtgtgcccctctcttgagtcacattgcaccaatctggactggttgtcttcttttagtacacagctgtcatccggagcttcccttggcctctctcctgagtcagagcttcttttctttttatatcttctgttttgcttgctggttttagtggagcacttccagtaactttgtgagaaagggtacaagggaggtaagtttttcgaggccttgcatacctgaaaatgtctattctactatcatacgtggtgggagtttgggagtagaattcaaagctctaaaggaaaattaatacgttgatctgttgtcttctgtttctactattgctgtagagaagtatgaagccattctgattcctgacaggatacttaggacctgatttctttttctctctgcaagtttataaagtctttttgtccccaaggatctgaaatgtcacactaatgggccatgacatgggtttgttttcatccactatgctgggcattctatgacatactatgtgccatttcattctgacacctcaattcttcagttttgggaaattatttttgaaacatttattctccatttttcttttcattctgcaactaacactcaggagctggaatctccataacagttatctgattttctgttttctcctatttttcgtctcttcgtatttgctctaattttggagtaatatcttctaacacttctcttatttttgatttctcataataattttcaattccaaaagtgtttgtttcggttctttagtttcctgggttaaaaaaatcattttcttattttatggatgtagtatcttatgtctccaaggatatcattggtatatatttgcttaatttttctcctaggtgtatagtttctgttcccagtgctcttttgtttgcttattttgatctgtcttccttggtagaggcttttctcagatgtctggtaatccttggtttcttgggaactagaaagctgctctgaagctaagcaggttggtggagcttgttgaattttttttcactatagagtgatctgggttgggcatttgttgggaaatacctatgacaatatatctttagatctttcaccttgggttattagatgccctagagaagccttcaagtctcctgcaggaagggtaggtctagtgcttagtctgggagcttcttggggaaagaggacttgagggcagtctctctgcattcaggcttcagtgtgtatttggtcacttaatgaccctattttcattagaatactcatgacctgactatgcctcccaggataggtaccctatgttttaccctctttaggaaataatcctttggatattttcctggctggggaaagtgcagtccctctgtggaatggaaaggggagctagacataacagcttctcagatgccttcctttccagcctctgcacgtttgagacccccttatcccccagtttcagaggagccctgtgcccattttcagctttggtcactgctggtttgaggttttttttttttctttttttttttcatctttttcccttgcctgctgagttggttaccactcatctgtctgctttggagcttccaaaatgttgttcctattgtcccatctcctgttctcctgagtttgtcttttaaaaaacaattcctttacgtgttttttatggggtttcaagagagtgaaattagatgcatgtatttccaccgacttaacctgaagggtagaactgttgtttcttttttacattattgaatccagtacatttttgactatccaaagcccaaggcttctgaccatttatggaacacctttgtgccaggtactgttgttgagttcttttcatgtgtagagatgcaagtaagaatggatattatccttagtttacaaaagacaaattgaaactcagattaagcagtgcatccaaggtcactgctaaaaagtggcagtactgggatctgaatgcagtccaagatttgtgttttgaaaccctgtgaaggtttttaccaagtccagttcttcccatacaccaggggccgagttgaaataatgcttgtgaatcctattaagatctctatgagttaactggactttgaaggagaaaactattctgacatgttttgagttgtgtaaccttgatttacaaagtgaatggggcacccacaaagtgtgagaagcacctgctttccccagctgcagggactcttgcctccctgctagcttgatgtgtggctgaaggtcattcatgggcactgttgtgccgtctatctggagaacaaagcatgcatggttttctggcccacccagtagaatgtgtgtcttatgggtgatattgtgcagtaatgaaggacttattttctatatggccacaaggctaggtaactcattacccattcagtgtcatgagcaccagcatcacatttccctattgagagttttgctttttttgcaactgtatggagtcactgatttgcaaaatgaatacagccataaatgggagctgtagagtctttacagatttattctttttttttttgtaaacctttgtcaaaccaaattgttcagaccaaattatgtatcaaaaactgtttgttttcagcactaaagagctgcctatagccttaagtatggactgggtggatttgaatattagagtattagaaatattgctaaacaatgaaatcttttttcccctcgagtgttgaggggtgttatcattcttgtaacaggtttcagcttcagtgagctttctaagcatggctgcttagttaagtacaagattctgtttatattctttttcataactatagctagcccttttcctataagaatgtaatataaaatactgacacatagctgaaaataagcttttttttcccccaatgcaaagtaatatcaacctgcctctgcctatgaaaccttgaaatgagctggggttccattttcatacagtgtgtcaagccaaattatttttagtttatttagagagaacccttttcatttaaagggattgaaagagcactggaccaatttcagctgctttaaaatgtgcattcggggtcttttaatgtcctctccagttttttgttttttgtttttaaaagaacattacaaggacactctataaactgcattactgtattggttttcaaatttaactagaccttttacctagagaagaaaatgatgggtaacatatcccatgagtattttatttgagaggaataaaatgcttaaagtattaaaatattttatttttaacactttttcatcatggggatatcatctcttccattcttgcctaaagagaaatatttaggtgtctcattgtagaaaaatctgctattccaaagccagatttcaaatcccgtgagaaatgtagaagaccttgtgaaggcagacttgtgattttggggtcaccatcactctagacaacctcgcacaagggagaatgactggaaagaaaactggacttcagagtcagatctaggtttcaatcctgtctctaccttgcattcttggaaaagtcatttgacctctctgggcctgtttctgcatcattaaatggggataatttgcagcttgagtagctattgtaaggtttagagagaatgtacatcagaggcctactgtggcaactggtgtgtaattgtgggttctgatcatagtcatagccctaattgacagcgtttagtacttgttagcttctgttctaagagttttatgtgtattaactcaccaaagcctcacaacaactctgtaaggtaggtactatattaatatctccactttacagatgagaaaactgaggcacagagagtcttcccagggttatacagctagtaagtggtggagctgggctttaaacccacaaagactggctccagagcctctctctcaacggctataccttaaccactatacagggatggctgataatgatgttctgaatcgtggtcatctgcagggcagagttcctgcctcattcatctatggcaggggtgtccaagggcaagaatacagtcatggattcttagtttctgttttggttggccagcaaagccccttcctcatccctcttttccgcttattactaaagacagaaacttaaaaaccatggcttcaggctgctaaaagcctaaaaacaaaacagaacaacaacaaaataaggtgggttggacaagcttgatctatggagtacccgttgcctgctataggtggtggtagattctccataagtgcttgctgaatggatgtatgaagcactttccatagcttactgaggtgggctactcttgctacacaaagtgtatttttcctcagagccactctatgcaatttccttgagcccctatgaacctcctctcacctttgagtgctggtaccatactcagtgtcagtattttcactgagctttccatggcatggccagcctgtccacaatcaccttccagtgactctaaaagatttccttgataaatatcgactttgaaagctattccactaaagcaggggttggcagaatttttctttaaaggaccagatagtattttaggttttgcagggcacagggtctctgtcacaactactccactgcggctcaaaagcagccacagtgtccgtggctgtgttccaagaaaactttatctacaaagagcctggctggttgcattcggcccgagagtgctggttttcccactttctcgtgctgaagaatcatctttttcaagtagagattcctgggcctacctctgttaaaagataatattcagaaaaggcaaaatcattactttcatacagataaggatgaacatgttttaaagatttcattttacccacatgagggagcctggcagaagttataagcagttcaaagggaaaaagtcaaaaagcacaaatttatattgagtaaaggaatagaattgcaaatggaagcaaaactgattttttcccctaaagggggagggaagtcaggcaaaaccagacaacgacagagtttttaatattttccagttgcctgcaacttatgaagttgcaaaatagctcaaactcagtgagagcttagaacctgataacctagagggatgtgctctatagacaatacagagttttgcattttatgcaccctggagagactggttcggtaggtctcatgttgtacttagaaatctgcattttgaacagactcccaaagcattggtcaggcaggaagacttcatgccacactttgagcaacactggttcattatttgtatgctattctctttatttagaatactccttctgctctgtgagcctctcttctgatttagggaaatcagccctcatcttgtgaggcttacccatccatttgatcagatgggtgatagttttctttgttgtggggattggaagggacagggaaagattgactactgggaaaaacagcctcatcttacatttttactatttgtttgttcacatcggagagaaggacaaaatgatggagacttaagcgatacgatgatttaaaaatattttgggtggattaaggaaggtgtttgtaatggaggaagaatgaaccttggaagtcgttggtgcagtgaacatcaggaaggtggaggaaggaagatggagagaatcaggccatcactgggaaggaccatagggtggtacagactaggagaacaggaagcatgaattctaaataatcaggagtacagagacttcaataagcatgttagggaagtcagaactcgttaagttcacaatccattgtacatttactttcttactgatctttaactgtcagccactgttcatctccatcaaatgctgttcctctctggatagaacagcagacctggcttgtgcatttccggagaatggggaagttcagaaagcccccagactgtcagccagctgacttcctttttactgggctttttctctgtgcgaataagcaaaggaatcacacacggacagatggttgggtgggtgttcttgatagcgtgtatttggaagttactgtcaagtcagggtgcatgaggcataattccccctctgatttgctttccagtgggaacttttgtgtctgagagagagtgggagagtaaggagggttcatttccccacaaatcttttactcaaactgtctggcttctcagactatacctctagtcgctgagctaccttgagagtggtaccatttcatactagctaggagagtcttcatgttaattcctttgctcagtgagttcagcagtttacagggcagacattttccttcatttgattctctgtgagatgctgtgttaggtctaggggcttcattggacaatgggcacaaatcctggctgtatggggttgggagttggtggtctctctgcgggtggtggtaggtggtaggtggggaggcatctgggtggcacagactgtggaacaaagtagttgtgttatagtggaagctgggtggcttttcttcttggcggtgaaactgtgtctttgaagacattgcactttggcacctgtgccttgctaaggatttcatccctatcttgtctttgtcctgagattatatctcaggacctgccaattttgccagaaatgtcaagttaccatgcactgaaaaatctcagacagccaagaaatgtactatttttgctagcatcaagagcctaagtgataagagtgtccaggtggtggccactgctgcccctgggatatctcaggcctcctgcttgactgggaggcagcagccacgccagctgtttgggccccactcacaccagggcccccattgcattggagtctgccctactgtggaatttgggatgctgcccttgttgcattcgctctgctttgagtacttggtgcttcctaaaagagcacagcaagtgttctttgcaggtgatattgttcatgccctcaccttgtttagactctaaatggtacctgaaatggcataggttatcagtgtttattagctaaggcatggctcagccttgagtccctctcaagagctacaggaaaggcctttgcattgtctctaaatgatcctttgctgcttattttaatcacagaagccttaaggggactgatagttgtatgaagggtaggagcttgtttagcaggcaggacatattgtcattttagattcataacccttcattcctaaattagattgaaaatctgagcagctctgtgacatctacagtattgacattctcggttttgtgttcatgggttgccaacacagagcatactccgacaaaactgtaaaattgtatataacttaagaatgaatttttatgattggaggctctcctgtattgtacaagtcatcttattttggggttgcagatagtaataaatacagaagttttataaacttacatttggaaattaaataaagaaaaatcactaaggaagtatatgcttcaaaccaaaaatgaagctactcagattttcctaatttaaacataatgtattttcccattcttttccctaagacaatggtatctatcccctgtgctagagaaagtagtgtgatgtggttattgttatttagacccacttggaagttcctgagggacatggcgagggtggatggacttgtctgcctgtgtagcagtgtggaagccatgttttaggaaagaagtggtgggacatggagagaaagcaggtaagagagttgtgaatggggtagggtgacttctacaagtacacagttctgacgttctccttgcctttcagttgcaactctaactcatcagtgatgataggccgtcaggaaaatcctctttgtggatgttataaaccctaaataccaccctgtaaagaattcgcctcctcatgggagcagatgggatggccatacctaacacttgtctcttattgttaagcaaagccccatcttggtctttaaatcatttcctgtgagataggctctgaacatgtggcttttgaaaatccctttcttagggcccttggtttagaaattgcttgccttttctgtttgagattgggagccaggtttatcttaattcattctgtgtcacaaatgagacagaggacttgttactgcagacctacaatttttgtctggagaaaaggtatgaaagggatcagaatctcccctcctcaactccagcagtggcctgatctggcccctagagacctgactacaaggtgtggacagttcctctgttgtctactgtccaccttcaagggatcaaacccagttctgaaacccacaacctgtcagagcagagaagaacccaccatcaggcaaaaggactagacatagggcaggtggaatctaagaatatcttggcactacattgggtgaggaatatagaatgtggggagacttctgattggtctctgccccttggcacgctgaaattcctgactcatgaagggcaggacatgtgtttttcctcactctgttcccaacgtttagcacaatgcctggcacatagcagaagcccagtaaatatgtacttaaagcccgttagaattagtggtgctttccgttctgaatagattgggacagcctatggatcttgaaaggcataagcaaccaagggtgttagactctgtagctattaattaccaaacaaaattatagtcttgtactctaagaagcagccatgtcttgagtgagaaggcttaggatatgaggactagatatcagcaaggataccataggtttggaaagacattttaatttacccttagaatacacaactttactgatttttaaggatgatcagcccatcatatagcactttattttttcttttaaagacaatcctgtttcatttaccttcacttgacacaggagtttgagaagtcctgggcaggtatacctggttattttgtcattggtagtctttttaacttttagaaaataatcctagtaaactaaacctgagcctctgaataagatgttgtctgcctttgtagctatatgagaagagtggcagaccacagcttttgacggggatttttgaataaaataactaaaaccaacaatacagcaaaagctcatctgggaaaaggacaaagagtaaactagtaaaatgtaaggctgtaaggaaaggggtagaagatcagaggaattctcatcaaaatattgcaaattatcccctgaacacaaactggtaacggtggtttgcttaagggaaggaaattcggagattagggatactgggtgaaaggcagattcttttttttaccatatattcctttgtatcttttaaattttgtattacattcgtgatctttcagaaataaataaataaaaatgcagtagcttcctgatcagaaagagggaataattgctgtcacttgcgtttcagaaacatagcatccaaactgatgtgattatggtgacctgtcccacttagttttgctgatgtactataattactttctccagtgaggctgacttcagaaacagttgcagatgcagaattttaatccagggtatgctgtatataagtaacttttgcatttacaatctaccatttggcgttttatggctaataatccacaaatatctaaactaatttataaaggcaaaaactactgatttaatgtagtactctgcttctgtatccccgaggtgagtcagaaaaatttcaagttgccacgccttggccagaccccacagtatattggttattggtcctgaagttagttctttaaaataacttgaaatgtttcatgcttagttctaggatctatactttctttgatttgactgggactgaaaggctcagaataactgaatatccttggctctaaataagaagctgtaactttgggccaggtgcagtgcctcatgcctttgggaggccaaggcaggaaggtagcttgaagtcaggaatttaagacagtctgggcaacatagtgagacccccatctctataaatgctttttaaaagtagcagggcatggtggcatgtgcctgcaatctcagctacttggatgggtgagttgggagcgtcgcttgagcccaggagttctgagctgcagtgagctgtggttgcactactgagctgtgattgcactcaaggctgggccacagggtgagaccctgtatttaaagaaaagaaaaaagaaaagaaaagaagctgtaactttagttaggattctgactggtatgtgatgtcttgcattagatcagaattgggtcctacttgggaaggtggagagattgagtgccatgttggcagtttaccttcagtagaatgtaaagtaagcccatggtgaggcaaagaaaagcagtcctagttctcatgcctgtctttaatcttggtttctatgacttgtttagtccagacttggttctttcccctctttttctgatgttgatcacgcactagtgtgatctgcaaaatgatatgcaaatattagttgtgtgtatatttctgtttgtttgggatagccttgcctactgaagagaataagaagctgggtttctcctcatttacataacaagtaatatggtatggaagatggaaccgaagatttgaggtcagaagacctaagttctatggcttttctacaacctagatggtaggtcttaaatcttggttgatttgtagtttgttgttttatctgtacagttgaagctaacccttctcacctcacagggaagttgtggagatccaagagagcccatgtgaggcagcactttgtaaaccctgaagtgtgatcattgtcagatttatttactcctatttgtaagcattactagcagacccttcggtttctgagaaatttggctttctttttgaatgatgaggcaagcactgaagttaatgccatgtggtaagatcaaagaccttcctggaactcagcttccattcctcccaataatcatgaagaggattcaacttcaatcactgagaagttgaaagctcactgtgttctgggagtttctcttcacctggcttccaaagcaccaccttctcttggctatccttctatctcactggttgctctttctcagcgtcctttacaagttcttgttctctccccattcccttaatgcagggtgggttccaggtctcagtctgtggctctttcctctatactcatttggtgacctcatgccatctcatgactttatacattattaggttggtgcaaaagtgagtgagggttttttttgccattaaagtaatggcaagaacttcactcacttttgcaccaacctaatagctcaatcctgaaaactcgtagactttctcctgaaatctggactcatattccatagcatctctatattgatatcccaaactcaatgtgtccccaaactgaacagatttttcttccctcaaaacaaaacgaaaaccagttctgcccacagctgtacccttccttaaacccccacttctttatttcctaaattatgctctagatacttctccatggaccccaccccccacccctcagtgcctttggtagagtcacaaggaggagaaataagtgtatctcagtgttagaactgaaacacaacccacattgtcatccactgtgcttattttaaggatgaggaaacagacccaaggtcacacttgggatgcatggattcttattctcttggcagacaactctgagagcttttgagtgtttttttgttttgttttcatttgtttcagatccatacagtgtagtcatttataaagatggatagcctaggctggctccaggcaagaggcacaaccaaataatgtatgagacataatttgcctttcagcattgctgttatatacctagtaagctatggcccccccaccagccatcaaaatgttgttatttaaagcttcacattgtaaagctgtattatgcctaccagctggaggaaatattgctgccagattggttctgaccacacacatctcttgagaccctgaaaaccaggttcatgatgaaaggtactatgcaaggacaattattgtatttatttttaggttgttaaattatttatgttaacagtcgagagacttctctgttttttaactaatgaatgttgacttctctaagtaaggttagtagtgctcagtaaccttacaggtcactgaagaaataggtttcagttattaatgttctctaagctaagaaacattgcctagaaatagtaactagagcctaaagatttaagtcaagaagaaacaaataatcaaggcagaattgtctcgcccaattataagtagtgtttttaatctttctgtatcttgctcccttgaattagaaagcaaaaagacaatattgaatattccttcctctaaagtggtagttctcaaacttggctgtacgttggtatcacctgggttttaaggaatattcatgcctgggtttcacccccagataatctaatttagttggtttggggtgtgtcccaggaatcaggattttttaaagctccccagatgatttttaatatacaactaaggtttgagagtttctacaatgaagtcttgaaagcagtttgcagaggtctgtcctaattttttgttttctggaagagaccagacacccttggaattttccatatcttttactcatttatggaagatataaagatgaaaaatagttcccccttgcctgtaaacagtatacttttccagacccctgagaactagcaacatgtatctagccagttaccaaggcatggagcagatacatttcccaccctgttgagcttaggagattcttattattgtctcccttaatctgtctaaatcctaagatcagctcaccaccacccaccgagtaattgcaggcctgagatttgaaccctggtctttctgaatttaaaaccccttttcttaactactgaggcaaagtctagtaggattcaccaaatcccattccatcttcttcctaggcacacagctagactacctttctcagcctccctcagagttaggtgtggtcaggtggctgggttctagttgataatgaaagcagaagtaacgtatgccacctccaagccttgcctccccaggtgatcttccattctttcctcatctgtcggctacaactgaggaccatctttggatggctcccttccaaatactcacagtgcaattctatgtgaacaagaaaaatatgttaagggagagacttgagggtttatctgtttgagcagctagtcctacctgaagataactactgtgtagtaatgacccaatggagaggggaaaataatagagtagagatcccaggagatgagatccagagcacaggtgaaagcattagttttgaacaggacacatctttgattttgagaattgggaaggaggatgaagcaagtgtggatacatgaaaattttagacgtatgaggcaattttctttctgatagcttcaattttctttgtgatgtataagatataagtcatctgtgggaacttcgtgggaccaagtaggtagtctgaggagatagtgttttggaaaacattatcttatggagagtggaaaagagatccaaaggagaaaattgcagacagtgtcaggaatctgttgaggatgggaatcacgtgaatttgtcaccgtaaagactgtttcttgttcactgctatttcttcagtgcttggcattgtgcctgggacagggcaagctttgaataaatgattgaaaaataaatatagtggtactaaagaagtgagagctggaaaaatgagagggctgtggtcagagagtgggattttaaatgtactattctggaggtactttcaggttctgacaaattttatgtttctggctatgggagtaggtggcagacatggaatgaaggtgaagatcattgccattgggaatacttcaggactgagatgctaaaggcaagaagtcaccctggatgatagggcatggaataaagtataaccatcaaccagctgttaatctttaaaaatataaaaagattggtacttgacattaataggaagtgatagagtgtggtatatggtatagccagatggtctgagcatcaggagagcaggatgactattcgggagtgaaagtgcagtgatccggaagttgcactggggcatgagaaagatgttaaccgtgcctcctggcaatgagtgtgttgggtgtaggagaaagggccacaaaagatgcagtacgctcagaggagatctaggttccagagagggctgggaagtgaaaggcacattcagaagagaggagtttatttctcaacaaaataactgagtaacaatgggaagactttgggtaggtgtgtaggggtgctgcagtgagtaccagttatcccttgccacattaatgctgcatagcaaccataaatcctagagagcattcaataattactttattttgcatgtttctggagtcagatttggtgggggggtgcctaggtggctctaatggtcttggttgaacttacatgtctgggagttacctagctgtcagctaatctatactggctttggctggggtaatttggctctgcttcgtgtgtatctcatctttcttctgggatcaatggactagcctgggtatggccttatcatagtaaagacagagacaagaatgaaagcaagcagaattgcttaagtgctcttcaagcttctgcttgagtcgcctttgctaacatctaattagtccaagaaagtcacatagctaagtttcaaagtcacaaaattatgtagcaaagggtagggatgtaagaagaggtgcagaattggggcattttttgcaatttatcacacattgggaaagtgggtaaagagagaaattgaagagactatggctggaagaatttgcactgagggatgagcaaggatgacttgtaagttaagccagtgtgatggttggctggcagaagcattaggttccagtaggcatctgatggattggcagtgggcactccgagcctcctcagaggaaactgatccacttaccctcttggccttagtttctgcatatgtaaatggagatgctaacacttttcagattgttacgtcagtgaggtaatactttctaaagcattttgtaaacaacttaaaatatgggggtaggtgtgaatgtgtgtactagtccaatacccttttccagcatagataaactgccaggtagctagtccccaggcatgtgagtaagcccagtcaagatcatgagagccacagtgaggaatgttggggccagattaccatgtaaagtctgtgtagttgtctcaaacccctgccaaagctaaagtgactcaaaccctatggtttaaaaaaaagtctcttaaaaattattttatctctagtatactttcaaactgagtggtttttgccccttgtggggggatggcacagatatacatatgtatctggcatatgatggcacagagtacagacactaaactggtaataatgcatgcttcctctagagggcagtgccctccacccagcccttgctaagtcctctggtggccacagtaggactctatagctctttctttcagatcacctgctgagagccctctggacttgaatatgggaagcaagtctgcctaacttcaagtggcttgcactgggctgtctctctgaactcccttggatgaaggtgaacttccctactgtctagaacaggcttttcagatgcagagttctagatcctattgttttctcctgagcaatgtccagaaataggggtccattggcattaatgccaagtactctttttatacccccctccacaatgcccgctgtggggcatgggagctgtgttggtaagtggactcccaggagcatcctgtaagtcccaagcaaggtatgcaaatgactccgggagtgatcctggtcacatctatgaatgaggacctatttatggatgtggctttggaaagactttggcaaatatgtttttttttgtttttgtttttgttttgttttttgtcttaggaacacttacggtggcaattctgttaaaaataaaaagagaaaaaaacaactccagtcctcttttactgagcagggaaagagtccttaccggtgcatagtgggcagagtatagtacccctctgtggaggctttcaaatgaatgtcgtgcattttgacttaagtagcacaataaatatctctgcatgcaagattgtactatctgccttattcttctgtttcatctcaggtcaatattggagttgaatgtcaaagctccttatgttatattcagctgtcaactaggtattctgatggtttttaacacctctgacctcttgaccattccttggtggatttggaaaactgagttatttatcaatttatttacttgattctcatttcacatttaccaggtatttgtttttgggggatttgatgacatcatcattaaaaggaatgccattcactggagtatattaaggtttgtgcaatgcaggtggctttgcatttttatagctatttttaatggccagtaagttttaggccttggatggtctttgggcctgtcctaagtaacacagatataatcaagaaccatgttgtgtatttcaaatgtttttctcccttgatatttttgttttctttttaaagaaaatctatggcagttttgttcaatagaaacaatatgtgagccttgtgagtgattttaaattatctagtacccacattaaaaagtaaaaagaaataagtaatatgcatgaaatgttctgtattctttgtttttcatattctttgcaatctggtgtggatttcacacttagagcacatctcagtttgcactagccacgtttcgagtgctcagtagccactggctagtgcaatgaatcacacagacctgtagcattaagacggtgatgtgatacaatgtggagaatcttccaccacggtttgtgtactttgttgttgttgtaagcagcagcatcttgattaaatttgggacaatacacttgaattacttaaattgcatccctaattatcacacggttcacttgattaccctttagcaccttgttgctttttgagtagcactggaagaaaacgtgttgagaaccactatactgtttccgaaaaagctttagaatagcaaagctaagcagaaatattgagcctagctgctctgagagacagtatttatgtggatgcatacacacgataaaagactcaccactttagagcactcctcttaggaaaaagggacgggaggtgtgatgcttaggaccaaatatctaagagcactacagcttgttccaccttaatgttccactgacctgagggcctccagtgctccttaagtatggctaacattgcatgtatatgtaggacttacaggcatttggccttctcctgggctttttagaaaaaaagtctggggaaactcagacttgtatcaatttaagtctctgctcaatttagtatttcctgttctacaatgatagagtgcctttagaatcttgtctatagactctggaaaccagtccattctcatttaaaaggtattgacttttatttttttcctttgggctctaaaattggcctaattgtatagttgcagccagaatgagtttggcttccagtttacaatcttgtactatggaaggtttaggattcttatggttatgcttgagaagaatgagatgttttcaaaatttagaatgttgttaaggagaaatgaacaaaaggggataacttaaatttccccattttaatttagctattttatgccaagtttcaatccaaaatgtccagatcagtttagaaaatgattgtgtccttcatgtagtctaaaaagtgttaccatgccctgttaagtttatgattttgatttattgccaaatgtgtaattgtttctagaagaaaatatataatggatatattgctctgttctgtagccatctttatattcatgatttttagaaatcaacaacccacatgcttaaagggtggtaaatacacagatatttcctaacaaatattaatctaaaaggttttttttagtttgtttctacctcttatagtaggactgaatttacctccatctaacctcaaagttaggcctgatggtggggactatgtcacattggtaagtccaggtaaagactgtttatgagtatagcagtatcctcagtataatgtaattttaaatccacacatacaaatggggaccaaatacgtgtaatatggtagttatgtatacatctctactattctgatgtaatgattatgtcatgttcacggtatacctttaggccatttggggagccagcatgtctttttaaatccctctcattttttcttttaacctttagaactctctttttaatgtgatctgggatagatccagatgatctctttgtactcccaagttgccttgagaagatcccagtgatcagcaccacaattggtcagaaataccccatctgtgatgacaagtgaacagtgctcatttctacctctgcgctatgtgagaacagaaatacagcaccaagaactagataaatcttgaatactaaccttttcatctgtgctgtccatttatacatttctttgagtcaaagagggatggatatatttttcccctttaaattggatagcaaatgatcagtgggctagaattcttcattattcatagatgtaataatttaaaaaatacaagtggcttattttcttaatttttgaaaactccaaacatgaaagtaaatatttaccatctgagtctttaaacattgtttataaatgttttaattctggcatttttatagtggtggtctcggtgcattttatggcaggaagtttgagaaaaatgtaaagaactggtgaggattggggtggatgtgtttttgaattgccacagttcttttgagaatttcagtgccccatcaatttgcatagacaccatttgaataaacatggcctctgccaacaaatacactgaaaataattttcttttttaaaaaaaggaaagagaaaattccagtgaacagtttgcaaacttgagaaatgcagccttcggtataaaacaaaggtgtgctcagatagaacaaaaagaggagttgtcttttatatagaaagttcccactctgatcctcttatgcaaattaggaatgcaaacttgcttacttctgattggttgatgcaggccacagactattggttaattcaaacaatgtaaacagaaacagacagctatggaagtcccagaattaagtgaatttaggggttttctgggaatgcacatgtatgatgtgcctctattttggatttaggtcgttagccactcaggatccatcttgaaggattggctctttcaggattcacatttcattccttgttttgatgtttttccagaatcccaggtttaaatggagtaattgctacactttcaagacatctgtctgttgctttcctaatgtgagggatgtggattaaagaaacagcagttgcttcttgctatatgatccattgtaccttatgcaaagttaaacatacctaaactcttggctttcatattgtgaccataccccactaggacaatgctttcaataggtgtaaaacttccaaaggctttttcagctctggcacatctttgatatatcttttgcaattttttttttaggtctgatgactgtgttaaactatggagaagacacatcatttagagaacattctctagtggattgattctaaaattagacttgtcttaattggcgtaaactctcaccttctaattatgctaatgccattaagatttcaacagcacagcatcctgaagttgctgcagacaattgatctgtgttttctaccagtagcaatgatgacgctaattggtaaaattctcctggacaatattataggattctgaactagtatattattcatttagtttgcataaaactctccttctacactcaaatgctccaaaatcagtggctttttaccctttatacaaaattttatttctaagcaacactgttataagatattctaaaaaattgaatcactaaaatgctaagtttgagctgggggcatagagaatcgtgttaacaagaaccaccagagttaatttcagctactaattctgttgagctactttcactttacaagttcacttctgtttgcctgccggcagccagaaaggaagatttgaaatggttgtccttatgacatcgaattaatcttggaaaaagttgaaatctggttcaatttcataatttaatgttttaacattcattgactttcatttgccaccattatactgtcaggaagatgtctctaccaagtgttacacatgtgtatatctacaaaatggctgttaccaggagggaacactataaggcttcagtattacttgttgtcatcactattagtgagatttttttgcttcagtactcaagaatacaaaccagatcattaactgatagagaggaagaaagataatctgtaggaggataaattggaggaggatatttaaccatacaatgatagaagaccagaggttatctggtccagttcatgaactacagaagtctcttctgccatttcctggatcaaggagcatccaagctccagagatggggagcatacgacctcacccagtagtctgaggcagtgtgtgccataggtttacttactgggaatttttcttaagtatgtcttgttgaaacttctttttggtcttggttttgttttaggtaacaaagcagaataaatctatttgtacttgcatgtgatagatttttaggatatttaaagatatccataatacttttgtgatgctgaagccaactcaatttaaactatttctcagagagaagatttattttagtttttctattaaggagctgattctcctaattgatttagccgtcaagtagttgttgagcacatactttgattaaggccttacaaagttaagtaatgcctaaatttggccttaagggagcttgtccaataatagaagctatatacacaaatgaaggttacaaactgggccaatactcttatatacatgatgatataaagacatccttaattgattattttagcaaaataaatgttaggtttaaaaattttatgttaactatttagtgtatttataacactgagtgtgatagtaatatagctacttctccaagtaaatctaactagttaacttaactatgagcattttcttcaacatacacatgacaaagcaagcacttattttgaccttccatctttttttgtagaatttgaaattttgatactttattcatgtcaacatggacttcttatcgggtttcacagctaactgagcatttcttatttatagattagtgtcatttggtttcttaaatttttttctgtttacatttgcaagtcctttgtcaatttgaataaagtagaccataaaaggaataatattttaatacctatagattatattgctgcttgtctaagaaaatgcttaagcgacctcttatactgtgttcttagatgatattcactaacttgtttattcttgctaaaattttctttaagattttgttaagtacagccttcaaatttatacatgagatgattgctagatgcctgtcagaactatttcattcatattagtaaaagattgatgtaagatagcactgttattctagttcatggtggctggtgcttgaaaggatgtaaataaaaatttttaggaccagtcattgtcacttttaattcgaatcggaataattaaattggaattaatttaaatatgtatacagatggtcttagtgcaaagaaataactgacaagaaagtccttgaagttgggtgcctgataggagagactactgaggtattcgaagatttgggggagaggaaaagtcaaattggaacacatccttaagaatctaaaatctccagtagacctgcataaggctttaaaaggtaaacaccatcaagtacttattcctgtatcattccacaactcatgcatatatgtgaagaattgcagaattttgtaaaacgtttgtccatatcctgttagagatctgtcctgcagctaatttaaaactgaaccatgttcctcgtttctgggacttggcacttgactcattctcctgttaggactgtgaccttgctggtctgtgtttcaccccacagatctacatccagttgttttggctaggcccctgattctacctcatctgtctctgagatgggctgagttttataagtgggctggagaaaaccaccatggtagcagcagaccaatttctccatctacttagggactttattcccagcatccagattttcttttccttcttgctccttttccttcatgagggacctcacatttattgatacaactctctgcagcctccaggggtcctcataaaacttctttccagcctctcaggggtatgagaaaattgagactcaagaggtgcaaggatgagcacttgaacctcagccagatggtatttctgaactactgccgctcatgtgcataacctgataagaagccatggtcaggagggatccaggaagtgagcccctcccccaagcacaagcatgaagacatttatctagggcaaaggccacaaggggagaaggatgtggcccctgggtcggggtgggagaacaagcatagccctggttctgactccatggtgatcttccaggcagtgaacttgaatacctgctgcctggactcttgctgtctcttcagattatccttcctctctctctctctctttaatctgccttatatagatgtgtacttgggaatacttctatgacataacttccttccatgaaaataaattatacctttacttggaaccctgaagtttggaagagaaaggagctaattagtccagtcaattaagtcaattttaagttaattttaaatgaaacacacccctagatctagtttgaattttttaccttgggtgcaaggattttctagttgaggccaagatgccctcaaaggtagaaaaatactatgaaatacctcttctgttaggctttggcaagacttttgggggcagaggtggtgtcataaagggatcttctatactatttccatttcctgaggaagatgatgtaggtctctggttacatttcttaagaaattcacaccatttcccatctcagttgatgaaaattaatgctcttttgttcttagaaacatccttgccggaaagagaggaaaagtaaattctggaataatctaaaatgatgatgatgatacttaatgtctattgaacacttactatatgccccatgctatgtgttaacctcattcagtccttagtataaccttgtgaaaaaagtatgaatattatcttcatttgtagatgaggaaattgaagcagaaataacttgtcccaagttctacagcaataaattgcagagtaggactcaaacgcaactctgtctcaccccaaagcccattttctaaaacactgttaccactagctatgtgggcccttccagttgaggtaggccatggttctgagtggccctgtgctgtgcaggcctttatgagtagtaccccatgaagttcatcacaaacttcccatttctggcaaaggattctattattcattttcaggtgaaacttttaaaagtccttctttgtagccccattaattttatgcatttgctaattagggttttttttcattttgttatttatttatttatttatttatttatttattttgcaaaacataagggggctataccccagaatcaggccacatttgagtgcaataaacctctcactgttgatcagaacagctaagtatacctgccctgtccactgtttaataagtcaacctacttaacagcaggacagaagccattttcttttattgttttcttttcccttgctcatacaaaattctttcataactatcaccctgactttgagtgaataaccgttactcattctcttctcgtagagaaacatttaaaattgcaagttactttctgttcaaacagttgtccctgttcaaaatcaaatttcttgcacttaggatcagtgagactgctaagcaaatccccaagataagttttggatgagaatgaactcaaagatcagagcatcatggaaaatggtggaactccagccccaaggctatcatattgagcagaagtgaaagacaacaccagcagtagaggacagtgctgagtcacctggtgggaggcaggcccacagaggccaagactgtataccctgtgacagaatcagcatgaggggtagggcagggatttctttctttcttttttcttttttttttagtcagacagagtctcactctgtcacccaggctggagtgcaatcgcgcgatcttggctcactgcaacctccgcctcccgggttcaagcaattctcctgcctcagcctccggagtagctgggattacaggcatctgccaccactcccagctgatttttgtatttttagtacaaaaaggaggtctcgaactcctgacctcaggtgatccgccagccgtgggctcccaaagtgctgggattataggcgtgagccaccacgcctggccggatttctttttgtccataatttctctaataaaactacagtcctgttgaagaaacatcacgggacaaatagccaagatgttacaaagcacacgactatgtaagaaataaccccttcataattgaggctcattgttacatcctgactttctgggaggtgtttccttagctagcaaccctggaagttcctgtgtcctggttaggatttcagcttactgctgctgttggtgtcttgcaaattggcctttgggtattctagtgggcagatttccttcctgtaaaattccaaaaatactgtttttaattcatatgacctgtatgttcccatgaatacagttattctgatgttgctttaaccttgtgcaccatggcaaatatttgcttcctctaaaactccctccccagtttgcttccgttttacacgctcaaggccagtctattctaaaagagatatataatcttgtgtccttgctcctagacttagaaatgtcatggctatcattgcttcagttcaaccccagatcccttgggtggcccagctcagcagagcttgttttccttcatgtgctgcttagttattgttgaggctgctgaactcactttttccttcccagtgcctcttgaaacccagccatctttccccacaggagagtaagcccctgctgataggaatcttcccatgtgccacatgcacacagcagtttgccaacgtggatggctgccaatggttttctcctagttgcaagtttattttccctggatggcagtgctgtgccacacgggtggtccgtgacacactaggcttcccattgatagaagcttctttgtggagaagtgcctctggtgtacttggggttcccacagacatatgtgacagttgaataagtgaaaaaatattttcatattttagtgatttttagcttattttgcagcagaaggatgtgtcaatattagtgtacgctataggcccctcaagaggtaacagattgctccagccccgggggacttcactgactgttacatcagacctggagccaccagagagcaccctataggcagccacccatgattggcctattaatgaaagtgttaaggattccacactatgtacccctactttgtagggcatggcatgggtccctggctaactctgcaaagcagggagaatgagcaccttcctacaactgcacgttagggagctatacctctctccccgctaacttcccacttctggtaaaatgctacagtctttaatcttctgcccatttttaaaaaattgaaattgtattgacttacctccttcaccctatgtgactttctctctccaaaatcacagggcaggccccctatggtacaatctgagtgctacctataaaaaggtttttcacactgtgggttacaaagatcatcttagtgagtcatgatcaacattttaaaatattgaatacaatggagtagaaaatagaatacatgctcatagtgagggtaagtattgttttgagaaagccatgtttaagctgtatatgtgtacgtatatggatattcagcataaatctgattttttatgtagatcgtggtcaagtctggaagcccctgattgtagagccctatcttctaccttagtctcaaagtacctaccattcccatcagcttgcctttaaagttgggccagctcctgctctgcaaagcctcaattgtgtggaaccttccttaattatatgggccttgggcactccaggtcttaaatcattaaagacagattaaattatggccacactgcatgttctaaggcaaggggtgtactcatgggcttcagatttttttgaattaagacaaattggtcttctattaattcttggttaataagaaaattcaatttagcccagtatgatgctctgtaagcattttggatattcaaggcttttctctggaatgcaggggtttaagacatacagcaagcagggactttgctggggaaagacgaagtgtcttttcttttcatgctttaataggtagaaagaagcctcctagtgtacatggagaaatatatttagctatctttacgacaccctttgcctctgactgattatatggataaggaattgttttagcaagctctccccagccacatctagaaagtctcctcaaaggcatgtttatttagtctttagaagggacttctcgtgtgataatgagataagaatagcagcaactctgggttattgggcatttagtgttagtcacagacctaagtgatttactttacattatttcatctgatccttgtaacagcccccctgaggtgtctgttgtcatcccccttttacagagaaaaaaaataaactgggtactaaggaagttatgtaacttgtccaaggtcacatacctgtgagtggtggagaggggattccactgagcgtagcacacaagtccagcattcatatgccatgtgagatggccactttacatcgtctgatttggttcttatattttcccttctgcctggaatattctctcttgttcatccccagccatcagaatccattctatctcgtaggccctagtttgaatcccaccttttgtgaaatctttttttgcttttcctggtgagaagtgatttcctgctctctgtactcttgtggcacatggttgtctctctcttggcacatcacattctgccacatactgggttactgttagatgtaaatatgacccgttcttgggttgcggttcttatgggatggttctattgcttcttctttggtttgggtgagaatgtatgcactgtcttcatcagtggggtctgctttggcaacttcaagttcaggcttagtctttccctcatctctgagcaatgattcatgtcctaaagggatgagagtattttttttctcactttcattgtaattgccacatttcatatgaggaccacttattttctaattgtgattctatttaccagaattcttctagatttttctagattcttctttctggattcttctagaaaactcagccatgaatgagataggattttaaaaaatatatacccaagtaaaaatggacagttttgtactacaatggatctgtcccatattttactgtcatgtgccttcatgggttttgaaatggagcaaggaggatgccaggagaaggagaagtaggtttaaaacatgatggtgtgaaaactgaattttcattgcattttagaagcctgaaggtaattgaaatttagtttttcaggattgaatgtttagggtgcctttcttttaggggaagggaaactaccatttctttagccccttctctgtgctggactccacatttaacatgtttctgcttctcctggcttcttcctcacccgctttcaaaactcataaatagcataatagcgaaatatgagaacaaaagggcaactcccaagattgcatcttattgtgtttacagatatggaaactgaggctcagtgagattgtactcaaatcagctaggtacttattacctatctgataaagcctgaaatggaacccaggccaactttaccccaaagctctttgtccacagcatttactgttcaaggagaagcctggaaattttctgtttgtgatgagagagagactttcagtggacatctcctcaacaagcaagcccttccttcccttgccaaagctgacttgattaaatcacatattctttaagaagagtcactattttattgccttttaaaggtattttctctcttaaaatgctaacatttaactacagaatatgcatttaaaattaaattataagaagtctggcatttactgtgtaggaaggaaagattggagaaagatctatctcacacttctcaaatcacattaagtaggagacatcttcctaagagctgaggctgattctgctttggaggttgaataacagtggttagaagtacatttcttaagcacttgtatgtttcaggcacaatactaagcactttagctatatttcatttaatacccactatacctctgtgagattggttatcctcatttacatgaggtaagggaggctttgcccaaggtcatctgttaggtattcatgggagctgggttttgtgcctggtcagattaaaagccaaagcgtgtgctcagtctttctgctagaggatttgtgtgtagaatcttggccttggatacttggtacacaacctcccagtgggagatctcaagtatgtttgcagcatgattaatgcccagagtgcagccccctctccaagaatttctactgtctgcagttctgaagagaggctttgaactttcacaagtgaaggttttctcttccaggtgtgtgtttgtagttgaagaacaaagaaaactgtgcgatactagtaatgcaagttcccttgggaaggcatgtatgttgttcttaactgctgaacctattattgcttatctttaccttcagggtggcgttgacagagttaactatgacgaaaggagtccaaacccctctctgaaggaagtagctgtcctctgaccatctctacccgatagcggagttctctctgtgatgcccttctctggtataccctaaaactgaaatcttagaaaagaactatgtgcctctttcctcctccttcctttcactctcccctcttaattcaccttctgatcctttctttaaattttgttcatgtactccttcaaactctcaccaacaataaggtctgaattttgtctgatggtatgtaattttcacggtgctttcccattttgtccccatgatgcagacattatcttcattttgcagattggaggttgaggctcggaggtcttagccaagatcacagcaaaggtaggatgaaagagagagtaaataggtaccggaaaaggaaagaagaaatgcttttctcctggaatttcctccttctagtcttttggaaagtcctcttaccattttttctcaggccttatgaagcctttctccactagctgatgcctcatgctgctactgcctcttcattttcattacaaagtataaaatcattatttcacttaggtacaaagagctctcctccttttacagtagatacttgtcatgtttctcctgaaagccattaacaatttctgtttttctgtttccggcatgctctggggtgtgcgtttgtgttgccagagtgaatgtgcagcttctcttcaaccctgtctgcagtggttcccagagattaaagggagcacaccttgaggttatttgtatgattaaattgagcagctgtggctaggacatttcaagattggactggggattcagggtgactgtgactaattgaaaaactcaacaaaatgatgttgaataaggacaagtggacaataccatcatgagaggaaaaaagccacccaatctcccagtgggtatttataggacaattatgctttgctcattattgtgctgagtactgaggttgactcagaaaaagctgagaggttgtctctactctccaagagtttaaaatctagttggagagcaaagacctaaacacacgaaacaaataaggaaggaataaatggctataaacagtggcctttgtaatctatggtgctcagagaaatagacttaaatgccgcaaaatccagaggatgaaagattcaataagaaacaacctctgaccaaaccaaggctcctgctactgagaaggtgcacatgtaaatgattaagatagagtgtaatcacataatacaaacaactacaagagtaagcagctggagggcagtggttaaaagcatagactgcagtgatgctgcttgggttcaaatcctgtccctggcatttcctgatcatgtaatcttgggcagtttatttaaccactccttacctccatttcctcatctgtaaaatggggagtaataatcctacctcccatgaggtaggattattataagggttgaataagttgatacatgcttctgagagttcctagcccatggcagtgctttgtatgctgtggtgatagtgatgatgatgatgtcagtgaccagcagcccagaaaggggagagaacctctgctggggaagaatgggatggagagtggggaaacttgcacaatgggtccttagcaaagtttcttaaatgtccaggcagatgatgaggaaagacacaaaattacatgataggttggtaagggggctgcagcttgttgggtattgttgcagcgtcaggtttgagtataagggattcaaatcctgggagaagatataacccacattgggctataaaggatgggtagaacattagtagtggaggaggagggcttttcagtatgaacaaaggtatacagttgggctgtttgttcaaataaatataaaaaaggatgtgtaaataaagcaaaaaaagccacaagggggggaatgtgtctgcaatgtggttggtagctaagactcagcagaaagtacttaatactgaaacatcacattgagatttagcctatattaaactaaaatctccccaattttactaagaaaagcaaaattgttagaatggaagctgggtgtgacaggaaaaagatcagttccaaagggacaaagtataggttaaggagtgaaattttaaaaaatttaaaccagggccgggcacggtggctcatgcctgtaatcccagcactttgggaggctaaggcaggtggatcatgaggtcaggagatcaagaccatcctggctaacacaatgaaaccccgtctctaccaaaaaaaaaaaaaaaaaaaaaaattagccagatgtggtggcgggtgcctgtagtcccagctactcaggaggctgaggcaggagaatggcgtgaacccaggaggcggaacttgcagtgagccgagatcgcgccactgcactccagcctgggcgacagagcgagactccgtctcaaaaaataaaataaaataataaaacaaaataaaaataaaccagtttttgctttggtggtaatgaatgagagataatgggaaggaggggcagaaagggtggtatcttgcctgtaaaagaccaacaaggtaaatctctggggtttgtggaatcctgacaatgccctgtgcttctctcactctgacactatgaatgttgctttcagtgcaggatagatggctccagtgggtataataaaattaacggggcccaaactccctcttcttctcaaactgtgctgacctcagtaaactatgcacaggagagaggttttgtttcagtagggtgatgtataggctaaaattattctgagtcacctgtttgggggaacattttgctgagaagtgctgatgcttctgaccttgagcttaaggaatagctgcactgttgttctggtgacattctatgatgttaaatctttatttcaaccttgtgtgaccagacagtttactgggaatgaggagaaagcacactagtatcaaaataaatcttcatatagtctatcatagcttgttttttcagataatgagtgtccctttcgatttatatcttttgcatttccttaatgaattttgattttcagaataaattaagtattgtcactatatacagtcctgataaggctgaccttgttccccagagactcttttacactgccctcaacccccgtctgtaatagaagttgtttagaggcctttaaaggtgacattttgaagcaatctgtagggatgaataaatgacgtggattctagtcctggctctgcctccaactcactgtgtgatcttaggcaaatattttgcctctccaagcctcaatcttctcatttgtaaaattgtgagggttggactagagatgatattgatgaagatagtagctaacattgattgaatgcttctgatgtacaaggtgttattccaagcactttataaatatcaatttgtttaatcctcccatcagccttgtcaggcaggtactcgatcatcattgactccctcttacagatgagggaatgcacacacacaggtcacttgccaaaggtctcccggccggtaagtggtgtggaacaggattattctaacccaggaagacaacccctaagcctgctctcatggccactgtggcctcctgcccctcactgtcttgctgctgacagtgatgtctaatgtggtatccagtgagggtttagaaaatgtcatgacatccgtatttgcagtgaagtcaccccacccatctgcactcatacaccaacaccagtttgatcctactcaggctgctcattgctactgtgatgtttggcatcacttcagttggctggagtagggacaggggcagccttggagcccttgctaattcccaggagcttctaattctgctgctctgtgagcccattgcttcctggatgggtctgtccaccttgacagggtccccacagtaatcctatggtagacctgcaaacaaaggagttgacaaattttatgcctcttccaagagctcaatttaaaacagctgctattgctgatttgcaaatgaatgacaaagctgtgcacctgtagtcccagctacttggaaggctgagatgggaagatggcgagctcaagcccagcctgggcaaaatagcaagactcccgtctccaaattaattaaacttgtattcaagggatgatttgaaggaaaaaaaaaaaagaaaatgaatgacagcaaactttctcttgaacagtgagcataggaggggctgtgcagaaagtaaggagatgactattttctagctgcaaaacaacgcttatttttcccaaaagccagagcaaacctctggatttataactgtctagaagcttaacagaatgaaagattctctcaggaggcaattcagaacataaaaggattctggacggtacagattcttggtagcgtgcatggctgtggaaatacttggaagcactcaataataacataaataataataaaaatagcaatgggaaaattactgcttttgtttgacatttcctgtttaccagacctgaatgcctggttagtatattagagaaattatctgtttaaacctttcatcagcacaacagtttacatatgaagaacctgaaagtatagggttgttttttgggtgcctgcacaatttatgtttaagttaaggtacttcttgtcaattacctggcagtgaattactgacctgataaattccagacttattggtcaaacagacttaaaactctggtttttaaactagtaatagttggtgtactttctataaaaaaaaaacctgtaaatacattaaaactctggaaaaagtaatctggcaaaaagtatagatccaataccatagagcttttctataatatcttttgtattacatgttcataaaagaaagaaaaggctgcaggattttgtggcagacaggatgtggctatggctttggtaagtaaattttgttgcagggttggctcctacaaatattaatgtgtgtagctgtgggattttgtgaaggtagtgtttgtttttactctccctgaagtggcagtggaatagagtagaaatattaggagcagtgaatgcacgtaaaacaggggttcttagcaggggcatgtcagaaaccaaaggagggaggtgtatgtagttggagaaagtgcgttcgcaattaccattgcttggaagaacttgtgaaatgccagataatcttaaaggagggcatcaggtattttatgcttaccaaaagttgagaagctctaattacttccttgttcaagtgaatgatgatgtgtaatttacatgctgtaattatatgcattcatgtggagtggaatgtccccaaatttcaaaaattgcattaaggtgatagaatttggggataatatttattttaaaattctgcctttaagaacgagaatgtgcaagcacaggtgcaattatgtacttcattgcttttatctgtacttctgggacatttgtgtcttcatattgccagagaccagtggccacgggaaaacagattgtctcagttcacggtccctcactgaggtcagagcttaaatttcccagtgttccacttaggaagaacagtgctaatgtgtatcttttaagataactcagcctgaaagccatctgactttcagtgagaatgaggggtacactaggggagaaaataggcatcaaagtttggagagggctgtgctgcctatagattttcttctaattacattcacccagaaatgcatactttaaaaaaattatgcttactactcttttaacacagaagcttctactggttggttttgctagttaaaatccttcagttaagctctgtaaaattattcccccacttggattaaagggatagaacacatgcagttaatacataaaccctcatggtacatttgtcctgagttttactgaaatatttttggtagagatggggctttaccatgttggccaggctggtctcgaactcctgacctcaggtcatccgcctgcctcggcctcccaaagtcctgggattacaggcataagccaccgtgcccagccttgtctgtgatacaaaattttgtgtcacagaattctatttttaacactattactttctagaaggtaccaaacatactataaaataagcatttattgagtgtgtactaaatttaggacaccatattgggtgctcctggaaatgtaaaacacaatgatttggtccctaacctcaattgtttgcatgctattaagaggacaagatggacatttgtgaagtttcaagacaaattgaaactgtaatctgcaaagcaacataattgtggcagcattgactgaacaggctttcttttagccctttgatgtttagtccttattctcatggtttgattatggaagagtccaagatgctgaatgttagtcacagattgagtcctgtggttccggcagcttgtcaactctggttgctatacgtttggataatgttaataaattcattgttcaggggagcttacagtgtagagaaccaggttgagcacaagtcagatacacaaaatacaattaactataccaagtaaccaagaaaactaacttataaaagttcctggcatggtgtagtcaaaatgacttggcctatgattaaggacattgggtttttgctttgtcttggtccctaacagactgtgggacatggggcactacttagctttctctgagcctgcattcttatcttgaaatgggtatgctgattatgtgagcctcatgggattattatgaatactaaatggaattttatgaatgaatatactttataaactgtaaagcagcttacaaatgttagaggatattttaatttcacttgttgcataaaatccaagagccatttttcttcctcctactgtctctaatgattatataataacattttttcacttattctttttctgcttgtgttttgaggttctccctcacaatacactccaatcaaaataaagattatttgcatcactacatgtgtcccctcctattattcctgaccccttcatggacagtcacttttaggatttctattgctgtagcttagttgagccatttacattttatttattacttatagttgggatcttgctctgttgcccaggctggagtgccatggcacaattatggctcactgtagcctcaaactcctgggctcaagtgattctcctgcctcacccttggagtagctaggactacaggtgtgggccaccatgcctggctaattttttaaatttttgtcatcgtgacagggtctcgctgtgttgtccaggctggtctcaaactcctggccttaaacagtcctcccacctcaacctcccaaagtgctgggattacaggcgggagtcaccacacccagccaggcatctgcattttaactttagccaggcatggtggcataagcctgtaatcccagctactctggaggatgaggcaggagactcacttgagcccgggaggtggaggttgcagtaagctgagatcacaccattgtactccagcctgggcaagagcaaaactctgtctcaaaaaaaaaaaaaaaaagaagtaacagatgccaatattatgttattcctgttaggtaaggagggtccctggtgtaatcccaaatgtgcttgcttttttatttactatattatttactttttaaacatttatttttattataccctctagcattttggaaggcacttattttatatatgcttggtccttaggccctttcttcaccccaaatgagtatgttaacagattgtgacacagtgtgacacctcttcgtatgctgtattgtccacactgacacatttctgatgaccgccaagccctcattcttgcatgggaagagtccctgctgcagtaatgttagccacttgctgagctcacaagtcagaaggggggtggtggttcaagaggtgtggtgagaggctcagtgatggtgaaaggatatccaaaggatcctgccaatgccattggatcatttaagagagacctactttgaatggtccatagagtatggtgagtttggcaacaagccaattccttcaagatagtgtcttcatttatttgaagtcacttggcatgtagccttatgtggtcaaggacctaagccacacttttgggaggagctgagggaagggcctggcctcctgagaattgccagtattgcaccctccttgtaggccccctggttagccaaccagggattctgttctctcgctggtacaggctgcttgtggctacccgagttgggtttccccagggtccgttcagggcaaagggttgtgctgttaataggtctatcaccacagttttctgatgctgtacaggatgcagtgtttaaagtcaggctgaacacataggctgcttcacagtccctatcctttatttcaggaggaaagggatagccaagtctcgcagtgacaggcatgttaatctgtgggttgcccggctcacagccttttctgaccatctgttctcctagcacttgctgataagatggggcattgggacatggccttgccctcatcacagctgatggcttccgggaggtcacctgacctgagacaggcccctcagattctctcttccatgaatttgaaatttgtgttcaaggctgctcatcagtctctgttggatgtttgaattgggaatgctctaatgggaggcttttggacagagagagccagtgtgcatagatagagaagaatgcagctgatgtgcaagagaagtacatcccagagccctgactatagggaagggtagctcctttggcttcctgtcccaggaagtgccagcggcttgtgcttccctacaggatgcccatggccctcaggaagccccttgctcaaggtggcttgtatcatctcttgctagtagccacatgatttgtggttaagatactttacgtttgaataatgcgaggcaaaatgagttgagagaatggtttactaaaaataatatcaattgatgtaagaggtcagaatatagccatggtgcctgctggtccatcctgccagcaagccagtgcagtccttggtcacagtcactcacagtgtgtgccagggcttcagacagcccttggctgtgagtgaagacatgtggtaagagccaggggctttcctgtgcccaggaaagcatgtccttggccataacttgtgtggagcacaggtaggactcaaccattctggcccttcaatgcagctttaaagagtggtcactgggccagtcactttcagctgacactgtcaaaggggaaggatttctgcttcttgctgagaagccttagctttctaaaataagttgttttggtgactcttggggaaggaagaggcttatatcactggtctttgagttgagggacctgattaccaggttatacttttctggacttctcatttgtctaagaccacaacagtcatatttatttctaagcacaacatggaaggaatgcaacagcttctgatgctgtttccagacttgactattgcatctctctagccgtttttacatgtaaggatccctgcccaacctctcccatctcatgccctcttagcaacctcagaaaccaaagaaaaatgccctgttaatgtgtccttgatgagagctatttgcaaacaaagcactctttctagtcatatttcattatcagaaatgtgattacatatatatatatatatatatatagttaataacaatcccatgagggactcatctctttttcagggagcagatgactggggatgcagataaggtgtacccaaagtcttagaatacaaggtaaaaatgtcagtaatggccggatgcggtggctcacgcctgtaatcccagcactttgggaggccgaggcgggtggatcatgaggtcaggagatcgagaccggcctggccaacatggtgaaactccgtctctactaaaaatacaaaaaattagccgggcgtggtggcgggcgcctataatcccagctactcgggaggctgaggcaggagaatggcatgaacccgggagccgaagcttgcagtgagctgagatcacaccactgcactccagcctgggcgacagagcgagactccatccccccaaaaagaagtcagtcataagaggtatgtggaaaatcttaagcacatttagaagaggatgaaatgattattgtctttgagtgtcaggaaaggcctcttggtgaaaggacatcttcgttgtgctttgaaaggcaggtaggacctggctgagcagcgatggggcaggagggctgagcaggtagagccctgcatgtatcctgcaggagcaagcttgatggttgtgttgcctcagggtccaaagtgtagttgtatttgcccccatagccatgtaacgagctatgtaattttctataggaatagatctctggtgcaatataccattactaatagcaccttattagatacttcctctttttagttccaatatatgtcaggtttttgacagaatccttgtctatatgtgaaaagtatgaaggttgcaactatagtttttgtaaatttatctttaaccagcttcactgattcttaaagtcatccaggatttctgactctaagtgatgtagagtgtatttgcttatggaaaatagaagaattaaaataataaggcaaatactccttccagtgccatatcctcttttaaagaacacagctcattttcattgcagccccattacactgaacaggcttttctcttgctcttaatgtgtcaaaattgtatgacctatcgcttcctttgaagatcaaaggaaatgaaactccagatctgggaaaatggtttccccaattcctgtgctgttaatgctcctattcatccatgtatgaaaatccagggagataattggctagcaaaggctagccaattagctagcacaagtcttctgggacaatagtcagaatgagaacaggttttgagaaacagtgtaacttaggccttcctgctgggttcccagtcataggacttctgtcccatggttgcatccagagtctctatggggctgcccagaaagctgtttaccttctgttgtaacacctcccaaggcaacccactccattttgggcagtgcctattattagaaagttcttccttgtaatgagccaaaaatctgtttccctataactttccctaatactggcttaaatatagatttttgaggactggcctagaaacaagccaccaggtataacatggtttctcaaagaaaatacattttgagtttcaaacaagtaatgtataaataatccagaacacagcccagttcataaaatggagtatgcccaataaggggcacgggaggcccgtcccaggaaaggagaagggaaaaggccagtgcccccagggtcagtctgtagagtccgtttcttcccactctgcgtttacccatgtttcctggctattgacaattagaaactgcccaagaaacctcgctgtggaaattggttcagggtactggtttcctcacagctcactcgtaggaagcccttaggcagtataaagaaaaccaggcttctctttagcgttcacctacctagacgagagggtcagtgactgggtaatattggacagaggaactcagcccttggccttgactgctgttacttacactgccgcaagaggcagaatataataatggccaagaaaactgccttcgagttggacagaaattgattggactccgggctataccacttatttgctttgtgactttgagcacgttgctgaaagtcaacaaccgaaagcctcaggttttcatctgcaaaacagagattaagaataaatgtgatgaagcgtataaggagcacggtactgctcaataaatgtcgtttatcacacacatacatggttaactctgtttccagactgtgcccttcgttcatgaacagccaatcaaatccccctcccaggctgtggggtgagcagatacgatgcggttgccttatctcgtgactcagcccatcacttttggttagagctactttgaaaggcaattccacagtttcagagtgggttcttctcatatatgttgcacctgtggcctcttgtttctcttctcagggccaaaaccagagtacttaagtttcttaagctttcgttctagaatgtgcttggtggaaaaccaatactcaagacactacagttttccatgtgtttgtcaagctttattgattcttcagatcagtcctcccataggtttgttcctggtgctaatgatattgaacatttctggttcacgtcgacatacacatgaagatatttatttcccatactggcttttaaagtatcaaactatagcttggagtggaacatgctttcatttctatagatttacctgcttgaaggaggggaataatgcatagccttttattattttttttattatactttaagttctagggtacatgtgcacaacgtgcaggtttgttacatatgtatacatgtgccatgttggtgtgctgcacccattaactcgtcatttacattaggtatatctcctaatgctaatggatagccttttaaaataaatgaattattggccatgcctatagatcttatttatttttaattatggcagccaaattctcagggttgattcaaggaaaaatcagtgccaggatggacgatgctggcttatgaactcctcttatggaagagttaggagtaaagggttgaggagaaagaaccttctacagacaggctaaagaggacattaaaggaaagcagtagtggagggtcagggctttgagtaactgttctgccatttagtggcgatgaccttgggcacgtttcatagggttattaagaagattgagccagataaagcattaaagcacttagcatagtacagggcacacagatagtaagcacctcagttgtacattttttaagagacagggaaatcttacttaaatgctgttcattatcttggctcctaaccatcagctacagacctcatagagttataggatattagagcttcaaattacttttctattagtggtgatggattagaaggaactattcccatgctttctcatttagtcccccttgtggccaaaagcagacatttatgaagcaatgtgctggattagaagcaattggctaaagcacaggtttttatctgagtgcaactgccagggccttacagtagtcaggcccaccatttagcctccttgatgcagtgctagtgagaatagactttatgcctccaaagctcatacttacttacctgcctgctgtcttgtatttggtcagttagcaaatatttaactaagcccctcctgtgagccggcatttgtattggccctggggatacacccatgaataggatgaataggacaaaaatcctgccctcacagaacttaacattcattttggtagacagacaaagtgagtaaggtaaatagtatacaaaggtgataggtgcagtggcgaaagataaagcaggagccccgtgggggagtggaattctggtttcaaatacggtcatcagggaagggctcatggaggagcagagacctgaaatgagagatcttggaattccaggcagaaggaagagcaagtgtgaaatctctgaggcaagagcatgccaagagttttgagggtgaacacagaggcctgtgaggctgcagcagagtgaaccagtgggggctgcaggtcaagtaggaccttgcaggccaggataagaacattgactttctctctgagagatgaaatgttgtgggaggattttgagcaaagtcacgtattattggacttaggtttcagcaggatcatctcaactgctgtgttgaatagagaatgggggcaagggtggatgcaaggggagatggaggcttggcctagggtggtagtggtagaagtggtgaagtgtcctctttgtgcttttccaaaatgtctgatttttaggggggccaaaaacatattactattaccttaaagttatttttttcatagtactctgtcaatattagacatctgaattttccctgtacattgcatttagtagcagtaccatatatatatatgcagtgtggacatatgagtgttgaaaggaaagctaattaagtcactaataccagtttttaagttttttttttccttaaatcacctcaggagaaagttaggatcattgaaaggagaatcctaccttactatttatatgagaatcttgctcttgaacactgcatacatgctttcttttccaggtttttccacatttaatagtaggtcctcttctaacattatgtcttattggctccagtttcacctgaaaggaggcatgagttcttcagaccaacccacctcatcacaccccatcaatgcatagccacataaagcgtgggaattcagtgacttttttgccatctgagttctagcttcttcctgtgtataaagtatttattaggactatggttttggtttcagtattttgaagatgataatcctatatataaattatgcaaagaagattctcccttttgaaaataatggaactccaggaaagccaaataggttcaacataattatgagaaagaagtgtgccactgtcagattggcatttatggaaaaattgttacgattcgtttttccagattcattcccatccaaaattcacgaggacacagccaataaaagggagctgaatttgaagaagagctcgtcactaagattcattctgtatttattgagctgattctgtttgatggatattaggacagaatatttgaacagcatgttgtcttggaaaatcaggtacgaggtatggctgaggctttggtggatataaaggaggaaaggatttattccttccccacatgactcttaaaatcttgatgtattaatacaattaatacagggcagaacaaatgtgtagtcagtacaaacattctgtcaacacacattaatatgtggctcttgtttataagcttattctgacatgatctttttaaaaagtatcttattagtgtagaatttgatccgtcttttcacagtgctggttacctgaggaatggaagcaagggaaggggtttcttgccgtaactcttctttcactggtggttggctatctgctaatggcgctaagactgttagtgctcctggcactcacacggccttagtgtgtattcaactgtgccaaaagataaaggaggtggggcatacagggaatcccccaaacattaagcttctgtcactttagccactacagctggtgcagatttctaagtacataaatctcctggtaagtggctttgctggccccaattcctaataggcatttacctatatgatgtctatttatatatctgggtcatcatgaaaccagaggtatgagctatattcatatagtcttaacctctggtttgcttgcttcttcctttcacatgctcttggactctcaaagttgaaataagaccttcactattagtatagatcaaaaacctaagtcctgttttaaacatttgctaggagaactcaacaatgcttataaagaaaaaataatgccaagaggctcagaataagctacccttaacattcttctctgatgtaatagaacatttctcaatgtacggatatgtgtgcagttaaattctttcttttctttttgcttctgggcctttttggggaatttagtttttaagggagaagaaacctaagtctgtaagcttttagggtaatataaaagaaatgagaaaccaattcaatagggctgaccatttttttctcttttcccagtgtgatatacagagtacctaataacatgttcaggaattttctgtgactctatttgttgaataatggaattaagtataaggtagagctgtgtgggcctcatttgaaggagtttagttattcaagtagtaaaaggctctcttaacaaggtggcatttattattattttagcagctgtatagccctgattttctgtgacaggccaatttcaaagatctttaccgtgttcagattctgtttttaattctgaaaatactgtcaccatatgggtccatttttaccacttcatgggcccacaggacattagagagtattcagtctctagccagccacctccttgagccaccctccagctaaactccccaggatgagtacagagcccagcaggtgcagccccttggtgaatgctgttgaccagtctttggcatctgagctaacagttgaatttgatatttgcccctctgaggaccactgggcaattcaaagaaacaagtaactctagcactggaagggccctggggctagtcctgccactttgtagatgatgaactaagacacagatatgcaacatgactggtgtaagctagtggttgcaacttagagaaggaagtattgtttgctggacttacagcatgcctggagccatttcctatgaaatgattagttgtttcactacacatatgaagagactgtaatagacccacagtcaaagctagaatttctgacttttcatagtgctattcaaagccattttcatattttcaaaagcatctgtgatttgttataccttgttagacaatctgcattttagactctggctatctgatccctgataaaatccaaatagaagctagagtttgtgacaaatcactctagcttcatgacctagctcctgaaacttgaagtctatgaattggatctaggatgtaataatattaaaatacaaaatgtaatctcagtgggctgtactgggtacaaaaataaagagtaccctgtctggtcattagtgtatgcaggatcaatgaattgtgctggtgttttgtttcccataagtctttttttaaaaaaataagatcttgctctgtcacccaggctggagtgtggtggtacaatcttagctcactgcagcctcgacctcctgggctcaggtgatcctcccacctcagcctcccaagtagctgggactacaggcatgtgctgacacacctggctaatttttttttttttttagagatggggtctcactatgttgcccaggctggtcttgaactcctggcctcaagtgatcctcccgccttggcctcccaaagtgctgggattataggcacaagccactgtgcttggccttgtttccaataaatctttaaaggagaaaatgtctctttcttccatgtcctacttctcatattggcagccacctttatagacttgtccactctgttttgcgtctctttgctgtcccctgtcttccagcattgtcctctcatgttctagtgacagtcttcctcaagccttagtccttgaacttcccaccatcttctgcttctgtttcccaagattcgttgttcccgcttagctgtcacttctggcctcagccctcacctgcagctctgacttactcctaaattcaagccccacattcacaactgccttctgaacatgttgcctctgtgacctttggtcaccccaaacccaatagaaaacagagcctggaccagacggtctctggatttcttattggttctcagattcaattttaacaagtcagcacttaagattatctcactcctctcccgcttcttaacttccctgtctccttttaatgataccaccaacctgtcagccatataacatgtattatcttccatacacacacacacacacacacacacacacacacacacacccacagacgtacacatgtatacatgtacacgagacaaaaatggagtaaaaaggttgaattggtcaaaatacttgcctagagagagttcaaagcacatgtcttgataacagtgggatcttcttataaaaagtaaagcttttgttatgctagtgagcttataaatttttgcgtgtctgtgtaaaactacaaacgcatgtcctgctgggcattcttcctaccctttcttacccaggagcctctcgccacctgggaaagctgacagaacagtgggcttcaggtccagaaatgagccaactttcctacccctgctgctggtggtttatcagatacagggagaatcttagaaactctcttttgtttgcttaaaggcacagctataaatatatttcagcgtgactgagtgtgtcaagtttgagattctgatttgttgtatcagaatgttagagctgggagggaagcactggcaatcaggtttctctacttcctgattttattgaagagtgagctgaggcccagaaatatcaggtgatctgcccaaagtcacacagctcattaatgacaaaactacaactgaagccctggtcttctaaaccccagccaagagctctaacatttttaattctaatttttttttttttttgagatggaggtcttgctatgctgccaagtctggcctcgaactcctgggctcaagtgatcctcctgtctcagtctcctgagcagctgggattacaggcgtgagccaccacattcagctaacattctttttttctttttctttttctttttttttttttttttttttgagacagagtaaagctctgtcacccaggctggagtacagtggcatgatcttggctcactgcaacctctgccctgtgggttcaagtgattctcccgcctcagcctcccaagtagctgggattacaggcacgcaccaccacagccggctaatttttgtatttttagtagagatggggtttcaccatgttggccaggctggtctcgaactcctggcctcaagtgatccgcccacctctgcctctgccttccaaagtgctaggattacaggcatgagtcaccacgtctggccccagctaatgttcttttaaatatattgagtccctttctgccactcatctggaatgggttctcaagcccagtgaggaatcccaataaattctggttcttagtctattttaaaaacactaagtatacatacaatttgtaataaaattttaagttataaatataatggatgcacactgttacttcttaaaataagaccataacattatacaagctgctggtttctttgcttttctggtcactttctccacctctacctaatcaggtcccaacattgtgcaaagacttctcctcctctttgtccccttggcacacacactcacataagaatcagctaagagaatagtttgtcaggtacttttcctcttaaaacctaacatctgaggaacgtggattttaattattgatgatgtgtgtggagtttcagtgtcacgcattttcttctgagttacagaatcctctgggggatatttcacaatacctttgtgtgtagttgctatgaaggaattaacctgtaaacctctgggatgattgaattgtgggtcaactaaaatgcaatctagctaagacttctgcctacgatctcgcctgtgtgtttctttttgttggtttttagatacagtgctttctattccatatggctatttagtaagcagtctctttttgatagcttgtacctctgtgattcaatttctgttgtcttttttttctttaattgaatgatatagtaaatatgaacttgtgccatcattagaataatgtgcatatattcacatagaaggtggggcttatgaaccttgtattaaggatttagtgagaggaaataaggactttgccctctcagacctggcacagcagctgcagcagtttcatcataaggtctgtggtctgcacgcacaaaacagcgtgggctcaagtaaaatgcctctggacaggtgagaaggatggaagcctctatttctggcacctctctgaagatcaggatgctacaagatccacagagagacttatcagtattagccaggttgacctggcaagagcaaggggaattgtttatgttggctactcgttcccctaatggccattttaggatgaaaataaaccttagtaagtctgtttcagagcattttggataccccttggcatattgccaaacctatctgtaagttttctttgagtataattttaaagtaatatgtatcatcacacagaagccttttcagttctgatctaacttttctgatgccatgattatagctttactctgtctcatcaccaagcctaaattaatagtagctagtggtactttgctacccataaaatttgagctgtgttgtaagcacacagaaaatgagatgccaggaataagcaagaaagggagagcctcagcctggttacttctgatggaaggctgggcctgccatcctggcttgtggttgatttgggagcatataaggtggtgctggtccttcaccaggccagtcatgtagtttatccacggtctcctatctctctcctccccgaaccacagcgttggctgcttgctggtcaattcttctgagaaagaagcaaaacctccatgagaaaggtaacatatgctgatgattgatttagggatttgaggtctctgaggagctcagacacacaattgctttggtgaactccgaacttactcattgcacctcacagcaggagagagatgttttaaaaaaaaaagtcccttgcttttcagttcgaaagtcatgtttgagacatgactttcctgtgggtgcttgcaaaagtacatgtgtggagtgaatgtgtgttgatgagagccaagaaaaaatttatacatatgatagtggcttttgtcttgggcttatctttgtatggtttttatccttagtgagaaacatttttatagcaagaagaatgtgataaaatgccagttagagtgttttatggatctttagccctttgcttgtaggtgagttttttccttcaactacctggcaatttctttgaacacccgccgcacgtccaccaccaaccactactaccaccacatatggtcttagtcacctaagggtatgccgcagcctaaccattttctcccttgtctgtttaatcttttcttctttgtctttagccttgttatttccccagattactggccctttctggtccagagtggcattcttatcatttctgatagttcttcacagaggttcagagggtatagcaaatagatggctaacatgaaacttcttctcctttcttaactctacaattggttgcttattcatttgttaaatggacaggtacagaacattgactgtgtgcaaggtacacagctcccaccctcaagaggttgtgctcctggatatgcacaggaggatgggtagggtacagaaggaccatggtatactgcagagtgactttgaggaggctgagaggagtgagtacagtgtgtaccataagaatttaggatatagagtgataggatggataggtaagaagataggatggatagaattctaggtaagaggatcatcatgaacaaaggttgggaactgcccagagaatagctgttttcctggaaccatatagagtggagttcaagcttctgaacagagctggttcatcaggagtgtttgagtatgacaatagcaatattggagaaggccttcctcttctggttattcttagattcctagcacatgagtgctggaaggggcgtgtctaacccagtttccacgttattgagaggaacatgagtccctctaaggcttaaccttgacttggtcaaggttagaatgttggatgttttctctcccatgcaatatggtgttcatagtattgtgtttgtttgcacccactggcaaacttataaagaccaccaaggtctttataaggagtctttctctgagaagtcattatacaaaaaagaaacacgtttatagcagcacgattcgcaattgcaaaaatatagaaccagtccaaatgcccatcaatcaatgagtggataaagaaaatgtggtgtatacacacacacacacacacacacacacacagacacacacacacacacaccatggaatgctactaagccataaaaaggaatgaagtaatggcatttgcagcaacctggatggaattggagaccattattctaagtgaagtaactcagaaatggaaaaccaaacatcgtatgttctcactcataagtgggagctaatctgtgagaatgcaaaaagcataggaatgatacaatgcactttggggactggggagaaaggatgggagcaggatgagtgataaaagactacacattgggtacagtgtacactgctcaggtgatgagtgcaccaaaatctcagaaatcaccgctaaagaatttattcatctaaccaaacaccacttgttccccaaaaacctattgaaattaaaaagtctttttctgaaaatggagtatttgtgtaatttacattttatgaccattttaacaaactggtataggttttgcacttacatgaggagagggttcatatacaaagcaatgattgcattaggataaattatgttatgaaagaaaaggcattaaaatgatcttggtactgtttgccttaaaatcaggatttgtgttaactttgacatactgcatgtaagatttgtttctggtagtaactgaacttcatgaaatcactggtcacagaaatgtaagttatcagactctcatacttgattagcagtatacattttcattaaagcaatcacattccaataaggaccagcaatagcagttcacggaatgcagctgctcagtttgtatttgaagtgttcgtgtatctttgggagcaataccatgaagtcacaagtttccgaatgaggcatatattcagcctaaacaccgactagcttaactgaatttttgcttttgttcaatacatttacattgtgatgtttacagcttaggctgataatgctacagtggaaagtatgggggaaatttctctttggtcccattttaaatcacctcgcagtatttaccagatgtagaagttgtgtacgtatgtggtatctgataagctctgttttataaaatacaggttctaagacccagagaaatgaaaaaaatatattttttttctcaatggaatagtaagcatttactctgtgcctggcactgtgctaggcattagtaaaagatggcacaggcactgtccttttctacatagtgtccattgcatttttacccctaatgacttgacagttgattcttaaaatttgattttagcaggtaaaaggcattttatgtttccgtgttggggagtatggcagaagaggctgctcaaggaaagtacttttttaaacaaccaccgggtgtcagcagaggacttagaactcttggcaacatctgtgttcttggttttcttggatttaatttgctaggccatctccattggaatttttgaaaggcagtcaacctccacggggccactttctcccaaatattagtgtcaaacactttcaccgcaacactgcatcacgattgtttatctttgcctaataaaactagcactagttcctcaatctttttctgatttaaaacctttaattctgtctttcatggtgaaggttctacaaagtagacaggctgccagggtggggaagtgtcaccaaactctagttgtttttactgacctctccccccatacaggtaaagctcacacttaccttatgcagtgaaaagtacagggaccattcttcgtcctgcacacacacacaaaaatctgataatggagcttgatggttccaaattacagaaagtattttcagagtataaaggagagaggtctaagcatcttcactggcccagccatttggttcatggtatagcatatatttggtggtggtcacagatattaggaactgtgtattgattgacaagggaaaccttggcaaggtgggtatggatttgtatcatgccaattctctccagttttctcaccttgactcctcacttgagtgagcaaactagacagggatccaaggcatttggtatgagacattaggctctagggtggggccaaactggagatggtctttcttggacacccaggtttctttcaagcttcatgcggtatcagaagtggtagcagttacaaggctgtcagtttgagttgctaagctattggtgacctgaaagaccagcttgggagatggttagagacataaagcaaccccagtggctttagcagctaaagctgccagggcgtgtggcctgcagggggtggggtgttaggcatagtatgcaccctggaatctatcccataaagtaaaggcctgattgatgcagggttctagtttagacatgctatagggatttcctttggactgatcagtgggatttggcaaatcgcattacagctaattccaggaactatgcagattcttctgttgttttatattgaataaaatattaagacaacacatcaatagggattcaaaaatatttggaatattttgtttttgtggaaatttctgcaataatagtcaaagggaatcactgtgttcctgaaaacattgtgcaggatgtccataaaatatactgtgtacacacatgccatcaaagagggcagctgtcattcttcatggggttatacccagcttggtgtcaggcagcagctgggggaaggctctcagacctgtcgtatgatgtgctttgtaaactgctttttaaaaaagaagttctttattgttggcttgacttctaattaacacaataattgcatatgggattgtgtaaggggcacgtttattggggaaaataaatgaagtgtctttatgatgattttagttaacactctctgacatttctcgttgctcagggaatcctacagcaagtaccgtcttattcacggaaacttgagtcttcaaatttggccacattgctctgtgctgattctcacctctcttggcaatagcttcacactctcctctccctctttcagatcactggggtgatcctgctggctgttggagtctggggcaaacttactctgggcacctatatctcccttattgccgagaactccacaaatgctccctatgtgctcatcggaactggcaccactattgttgtctttggcctgtttggatgctttgctacatgtcgtggtagcccatggatgctgaaactggtgagtatgtcacaacataatactgctttctcaactatatttttgtaaaaatataaattacatggaggtgaagtggttcgtcttgaggtcacagacaagaccttaacaatttcagtccagactctttcctaatccatcctttaatcccctagaggtaaaaacaaccccaaacacagcctggcacactaaatctagtcccagtccctctgggtagatgatgacaaagcagtggccagtgattgcagtagtccatttgtatcctcatgacaagatgccctgtttcttttcttttttttttttttcttttgagatggagtctcgctctgttgcccaggctggagttcaatggcgcaatctctgctcactgcaagctccaccccctgggttcatgccattctcctgcctcagcctcccaagtagctgggactacaggcgcccgccaccacgcccagctaattttttttgtatttttagtagagacggggtttcaccatgttggccaggatggtcttgatctcctgacctcgtgatccacctgcctcggcctcccaaagtgctgggattacaggcttgagccatcgtgcccggcctcgccctgtttcaattttgaactatatcttagaagtctccttaagcatgtgatatgcagctttggtggcaaggcagcatcctgaacataagcagactttcacctccaagttcctattggagaaatactttccacctccttgagcctggccatgcatggatgcatgtgtgtggtcttctctgaacctgtactccctgtctcagtgctatgagagttgagctaagccagagcctgccacccagaggacttatgcagtgtcaagtgttggctaccaggaccagtgcagggtgcatactctcatgggacagataaagcagtgatgcttcccagatgataagggcagactattgaaaggctattactgtgatttttaacttttaggtacagcagttaactaattctctattcactgttcatgttcttcactgatggggattaatggtaaaggattttatagataaaaattagcaaggacctgtcctcaaaataaaattttgtttaaaaatatttatttcaggcatcttactccgtgaagggagaagcaaagattccatcagggccatgttgcctgtccctgtgtagccctaggttgtagtaacatttaataccatctagtgatatatgtgggtgtgagagtggttcattccaaaggaaccatcttcccaactggcactgggcagtcagtctctgttgtcaacctcatagaagtggtgcttgactttgccattttctatcctgcagaccatacaggaggctgatgcctcagccgccactgattcttcaggttgatgggcaagccataatgaggcccatcctgattatgggccaggcttctgctgctgtcacctggcactctattctaacaccctgagtctaccttctagtacttctcataaacactagggtttcttttggtctagtgccatagtcctcaactccagatacatgattaaatcacctgggaagccatttgcaaaaacctttgccagcatcccaccactagctggttgaagtagactcctcagtggtggtgaggccctggcatcttattttctaaaaagctctccagaggattcaatcttgtagccagtattgagaaccttttgtttagcacaatgagtagcaaggggagaattaacttcaaaagcagagaaaagaaaaaattctaaaaaaccatccattcaaacaagaagggaagtgatgtggtgttgagacctgactgattccaactaactgtttaaagtctttagcggcaaggatgtaacctccttggacctttgtctccaattgtaacaaaatagaattggactaaatcaccaaagtttctcccggcccaaatactatgactggagaggggtgggagaggtgatatttttatgttctaattctcaatttgcttgtggggcagaagtatcccatagctgagtataatgtcataaaataggatatgtgtataaacaatggaatagttagttctggcctcttctggaggtggcttcacaccacactaccattttcttctcctaacacaagttcactggcaggtgagcattttgggaagtagagaagttttttggtttggggcttaatttgggtctttaaaaatgtcttttagatcaaattttagattctacatatgtgtaagatcaggcagttattagtcttttctttccctgacttatttcacttaatcctctagattcattcatgttgtcgcaagtgacaggatttcattcttgtttatggccaaatagtattccattgtgtatagacacattgtgtccagtgtgtatggacacttaggttggctattgtcaatagtgctgcaatatacatgggggcgtggctatctcctcaacatattgatttcattttctttgggtatataccccgcagtaggattgctggatcatatggtagttctacttttaattttttgaggaacctctactctgttatccatagtggttgtactaatttacattccaatcagcagtgtataagagttctcccttttccacatcctcatcagcatttatttttttttttgtctagagacaggggaggagggagaagcagaggttggccaatgggtacaaagtcacagctagataggaggaattatctggtgttttattgcatagtagggtaactatagttaatgtattacatatttagcaatagctagaagagaggatttagaatgttcccaccacaaagaaatattttaggtaatggatatgctaactactctgatttgatcattacacagagtatgcatgtatcaaaacatcatactgtaccccataaatatgtacaattattatatgttagttaaaaacaataaaatttttaaaatatgatttggtccttttatgtgatagaggctatactgggtgcgtatgatattttatttttctcctcactaccaccatgcagtgtaggttatattttcatataatgtgataggaacttgggggtttagataacccacccaaattcacacagctaatgtatggaaggctgggatttgaacccttgtatgtttccttccaaagctaggactatttcaactccaatgtttacatttgggaaaaaagctctaacccctactgacctgtatttagtacaagctcgtcccaataggcttttggcaaatgctttctgtaggtaaaacggccactctctgaaagctcctagaggcaggaaacttgccagacacagaaaactgctgattcggctgatgagagcggaagtcacttgattaactgtcagtctagaattttgcagtccttatataacctcattaattgcaaaacaactgaaaataactatgtctactttatggaagcccagagaggctgcctcctttctaagaggtagttcataacaagataggattcaaacctaggaggacttctgactacagagataaatgccctttcttccacctgcctgctaacagttattttcccacccaactttctggaagagtctaggcttatcccatcagcaaaatgggagagtctcacatcaaactctgctttgaattgcattttgtatgaagttgggaaagaagtcatgtacatggggcattctcataactacatgtttagtatttgagtggctgtgctttctagagaattttgttaatatttagaaagaaattaatattttaagccaacatttcctttttcgatatatgtgccactagatgagaaaaaaaaattatgactcagcatacatatgtatactttatgagacatgtgtatactttacaggtaagtaatgtggccacatgcaatctatccaaattccacagcattgtttagggccattgcaaatgttcaaaaccattatatttcattttgaaataagaagcagattgtaagacatgtgccttgtaggtaaggaatcaattcttgtttttatctgcctttcaaagttatccttaatgtttcgtaaataccatgtactacccttgaatttaggcgtgcttgcatgtgcatgcacatgcaaaaaacttgagaagtatcagcagcatgagatgaaaagcactaaaggcgttagatgcttgcaaatgtcattagtagtatagtgcatttactttttgaaaggctttaaactccacgcagcatcccgaacaagaaaggcaggcaactccacaggaaagctgcagtggctactgtgtccagtgatgaccaccaatctgaagaggaacatcatcttgcacacgtttggcttcttgggcccagatgggagggatacaattccaaatgaagcagttttgtaactgtttcatctgagatgtggttgagactactggaggcgtttgcctaggcagcaggttctcatcctggccgtgttcacaaacatgatgggctagcgttagagaaaagacattgggctggttcttatttcttctgaaagcagcaccaatgccagtgagtggaagttagaagtaggcagacttgtggccaaagggaaaggaagtctttccaacaattggaacagtttcaaaatggaatgggccgcagggaattggcttgcagaccgtcgtgaggaagttggtaaaaaaggacccccagacagggcagaatgtgtcctgtgaccttcagagcagtttggtttttttctagctcaaagattctagtgtaacaaatagtggataccttagttgtgaaagttccttccagatttctccaggtgagccaagctgataggcacaatgccagtctctcagtgaattctccccagcctgtgtactccaaaatgcatatgcatattaaacacacattcctagattgaggcttatgtgggtaaatttagagacgaatgttttatatttttttctaaactttgtctagggagtgtgaggacttgtctaattcccgctgattgaaagtaacctaccctgaagaagccctcttcttaatcctgatgtatctgactttgtctttgtgtgcttaattttcagtatgccatgtttctgtccctggtgttcctggctgagctcgtagctggcatttcagggtttgtgtttcgtcatgaggtgagtatacacaaaatgcagaactcagttaaggggtgtttgggaggaggattcttgaaacctcttgaaatgtgtaaagggtgcatataggctagctgttttcctcagtggtgttgttgttttccaaagatcatgtcatatgacctgaaattttcatgaaattctaaatgtgggaattccaccaagcttgaaaccttcattgttgatcttcactgtttctctgtgtagccattgcataaaatgattctctcccgttataaagcagtgaccttcaatatggatttcatactccttaaaaatagctgcttcaggctgggcatggtggctcatatctgcaataccagagctttgcaaggcctggggcaggaggatctcttgaggccagaagttcaagagcagcctgggcaacatagtgagaaccccatctctaaaaaataaaaaaaataaattagctgggtgtggtggcttgcttctatagtcccagctacttaggaggctgaggagggaggatcacttgagcttgggaggtcgaggctgcagtgagctaatatcacactgctgtactccagcctgggcaagagagtgagatcctgtctctattttttgtttttaaaaatagctgcttcagtaaggcacaagtgtatatctgtataacaagatttctaagactataaaggcaagccaaactaattgtcttgctgcctcaaaattttatcattgactctccataaataatagtaaagccagaagtagatacacatgtgttaaaaagaaaaagaaaaaaaatatatacaggtggaaaacagagagtgttactgtgggtctcgaaaggctggcatcatctgttcccaggccctgtttttttttttaatttttttaaaaaatttttcattaacccatcttgctgcacacttaaagatcccactattgtgcttggccaagttcagttccccctgagcttgactgtatgctctctgctcccctactgccttgtttttcccctttaccaaagacagtatcccagatgccaaagctgattcccagaacccagtttgtatgggtgctgcatttggaattagaaccccattcatagtctctagtgaagtgagacctgatgaagtttcagcctcaacagccctaataagtgcccctcgtgcatgtatgaacaccaggagcagcctggcttgttcctacctgagcctcttgtttgttgctgggagtgcgctctgtggagaggtttttctcttaatggtgcttgctgcctagggcctggaaatcctcatgtacctaatctcttttggctgaaaccctgagggctgttgtgggaggaaggtacaatgccactctgaccaccagcgctggtcttgagtttggctagtcaaactcacatgatgacaataggtctcatttagtgccatttaacaaaagcagaaagatataacaaaggaagcacagtttgcctgctaggcagtagtgggcttgtttctccaccatgagtcctcaaaatagtctagtgcctattctgtgtacagtcccccatcctaagagacagcttaagtgtagcgaaatgagatgacacagctgggtgtggtagccaccttagcttagaagctgcatgtaactggtatctctatctcttgtaactgtcccatggacatagtttacagcattttagcaaagaatatgcctagttaggagagtcaccatacttagccctaagcttcccaccaagtagttattgtcatttgctgtcctcccaatctggaggcattttaccaattgggggtcagttttatcaataaactcagtggcctggtaacacatttgacattccaccttcatcaggtttccagggaaacagagcttgaaagttaccccaaagtcaaatgtggtaacagaaaaggttttgttaactttttttttttttttttttttgagacagagccttgctctgttgccaaggctggagtgctgtggcacaatctctgcttactgcaacctctgcctcctgggttcaagcgattctcttgactcagccacccaagtagctgggattactggcgcctgccaccatgcctgactaattttttttttgtatttttagtagagactgggttttgccatcttggccaggctggtcttgaactcctgacctcaagttatctgcccatgtcggcctcccaaagcactgggattacaggcatgagccactgcacctagccaacctttttaagttcttgtcctttattatcttttttttttaatttgcctcaataaagacaggtaagtgaaagttggttttgcctcactcctatggtaaaacagggatcagtttttgaccaaaacatcagtcatcctgtccacccaagtggtttgtcttttatgagcctcctgtgtaagggcagagaaagttatagaaagatgggtattaatcaattcaaagaaaataagtagaaagctcatgcctgaggtttggcagctcaccatcacaggcctttcagaaatggacaggcccctccagtaggtcattcagcaggtcaggctttctctggattgaggctgaggggaacaattttttaaattccggagcttaaaaaccccctggtgaattttctgagcttttccatctcagaaaatggggcattgcctccctggcctacatttatacagagactttcagaagaggctatgttagggtagaatttggtaagaattggagtcagtttgggctgtggtggactgcaatcacatccctccttgtcttccatagatcaaggacaccttcctgaggacttacacggacgctatgcagacttacaatggcaatgatgagaggagccgggcagtggaccatgtgcagcgcagcgtaagttccagaggagatgagggtgtgaactaactatgaagtctaggcttagacttatggactgcctgtaggttggcccagtagttgctatttgttcccgttcttcaactcttagtccagttccattgccaagagttgacacccagtccttgtccaggctccagttattcaggtaattaatgtcaaggaggaccactcccttgagtgtgccttgtatcagtaagggttgcaagtatggcaaggacagctcatttgctcttcagatctgaacccttgtgaaggagttaggcagtgagtgtgtgacaaccttgcttagagttggctcccggaggctggctttctggaatcgatgtcttcaggctgggtggagagctcaggcgagctgcattcactggctggggcagtggagtgggcatagagtggacctagaagaaactgaggctctgttaggtatgtgaaggtggtgagctgcctgatgctttgcggaggatatgggggaaatagaagagagatttcctgtctgggtggcaagtgctggcactcaagcataactgcccatcaggaatcactaagggggattttgctttggtttttcttggttttgtttacttcagaagaagtcttttttctaatttattttgataaaagttccaacatatacagaaaagtctcaggaatactacaaggaactgtatactcagatttaccaattaattatatttttgccccgtttgctttaatattctctacattggggttggcaaacttcttctgtaaaggatcaaatagtaaatattttaggctttgagggccataaactctgtcacaactactcatctctgccactgtagcacaaaagcagccacagacagtatgtgaacacatagttgtggctgtgtcccagtaaaactttatttacaaaaacaggtagctcctgggctatagattaccagctttggctctccctttctgtatgtgcatctttttttcttaagaactatttatttacttattagtagatatcccaggggagagttttttgaaaccatatttgcctcaactcaccaatcaatagtcctgatttagtggatgagtacatctatatcaataggtgattgtgagttggacacagacgcactgctttgctttgtggaggtaataagaaagccaatgtgatatataatttagaacttccttcttggagatcaaacaagcatcaatatgggtataattgttattggagcttccattcatcttgactcaccaaagctgcacatgttgtcttagggcttttgcctgtgtttctcttataaaagtcacaaggcagtgattgaggagaccacatttgatctgccatttttttattcttttcctttccctgttaatagctgagctgctgtggtgtgcagaactacaccaactggagcaccagcccctacttcctggagcatggcatcccccccagctgctgcatgaacgaaactgattgtaatccccaggatctacacaatctgactgtggccgccaccaaagttaaccagaaggtacccgctttctcctggcccagatgggaccagtggtgaatgtttgggggggcttttttatttccatgaaattatgacaaatagatttgaaatagtagtcaagggaaagagaatcttactttgtggttccttgattgcctgggagaggcacttgaggctgctcacttctaaaagagaaagctgtgactcagatcagccttgtctttctctcccacagcaaggatctaccaggcatagttaggaaggtttagcaagcagttcctgttaaccctgatgcttatgtcagacagcgagtgttggctttcttcttttggggtgtccgtcttctgcttaatataccatctaaacatgaaattgtttgcagctgggtgtcagtttttgacagcaagaggggagtagagttgacagacagcatctgcttctgctaggagggtggcctttattttagggagtttactgccataggaaaagaaatcagcaactctgattcaactcactgtcaacctcccgactcccaaagaaattagagaggggaaaaaagaggactaaacgaaatttaaaagttagtacatagtgaaaatgagggaaatgaagttttagtagtcagagaagaggaaaatcaattctgcattccattttacagagaatacgatgaagacatgatataactgcatgtgaagattatctacatcttaaatgtttagagaaataccatatataacatatattttggtaaacaaaagggaggaaaaaacctactattgtgtttacttcctgttattcagtcaaggggtaaatcttttcttgctaaggtaaaattctgttcatatgatgccttcaaaattctatgtgatctggaccagctactgaataattcagagaaaaaaagatagttcagtaagattcagtactgactgcttcttgtctaagttaaaaggacatctgtttctatttgaattttcttatgaacccaaacattgaggcttccttcatctcttattagttaataaggtaacttctggcttcctcatggacatccccactgagtacccatacgtgtcattatgcttccattttatgaagtgctaagcatacctggcatgtggtagatactccaatttatggaaggcaagaagtactctatggcagtgagatatttgatataacagagcttcagaaggttgttcatgaaagcagtacccaagtcttttttttccccccactcaagcttcctcttcttttgtgaaaattgaggatccagaagtcaggagcacagggtctagtgtcaggctccagtagaaattctgactgagccacttgttggttatgtgatctcggtcaagttacttaactttgtcagtcttgcttttcttgtctgtaaaatgcggataataatagtacatgttccttgtgcttgatttgaagatttaatgagataaagtgtcaaaagcacagtgcctggcacagattatgacacagatgtgatacatgttaactgtaatacaaatgatgatggtgaaatttgtcttctgtatcacatggagtcttttattaaaaatgatgcagcagtttcttatagggaggatcttttgttagtatgtaaaaacaagtttggagacgtatcttatagtgcatctataatccttacaattatttccagaaagagagatggggtcacattttttcatttcattgataaacctacacattgacctcactttccaccttcccactataatccaactttatattttcctggccacctcaaatacttagaagatctgcttaacttctctcttacttaccttatagcctccaacctggctccctcagaggagaaaaagtgaatgaaaactaaaatttgtctagcaagtttccttagacattcttatttaatgcccacctgaacttatgagacaaattacttttcctgactcaatgtcagacacctaatctatacaaggtggaagattggaatggggtaatagtagatgctcataaatgttacccttcctcccagtgactccttcccctaggaagcttaactactgccacattctagttatatggaatcctatgatttagaacaagtggatcatccctgtagatcctgtggtgtcttggaccctgtacttactctgatagcacagaaagatgattcttggctcttaccaggaagcttgagaaacctgtcttgtacagataactgggagagaacaggaggaaaatatgaacagttaaataggatatttattgtttggatttggggacaggttttattttgattttactagcaggatgatgaaatgtctgcacgttcagttggctaatagcattggctgaaatcctacttcatagggattctttgacagttcgtaagggcaagaggaacatagttactttgcttggcagttacagagatacctcttcccataacctgtctggaactagctttctacttctagtagttaaagtcggtcacttgcagatgttttccattggtgactattgatttagacgtgctgagagagtgagcaaatgaactgttctgagtgtttcctaggatacttagcaggtctgtgtagatttatctcacacctgacaaccgactttcatattaggaaattgagagagattgttgtgagtagataagatcatagtttaggggaaaatttaaggttgaatgtaaacatggcctgtggttgcagtattaaatcagctcttgcagtatgtggatctgtgctgagacatggaaaatgaacttcggggttcatgcagtaaataacggaaaaatccagagatggaaaacatttattttgacattggtctcttattgtttaaaaacaaaaaaactaagtcacttatatcttctcattttaattaatcctattactgatatgattcattaacttgctttcttatttggagtaaaaaataatgagaaaacatttcttatagaagagtgcttctcaccttttaatgggcatatgaagtgtcgggagatctggttaaaattcattaaaaatatgtcaaaagcaataacccatggatttggcagattctgattcagtaggtctggggtggagcctccaattctgcatttctaacaagctcctaggtgaagaaatactgctcattcaagatccatacattgaggaacaaggtttagagagaactatttcggctcagttgtactaatgccaggcagctatttcctttttctggtttctcctactggttggagtggccttaccaaaaataatgtgaccaagtctaaaatcttctagaatgaagtagaaatcatactttagaaaatatattcagcttaagtgtagaattgaagtgcccagaaaaaaatctatgccaaactgttttgcagaataagaaaatagctcattctgcttctctctcagttgtattatcaggcttgtgtttccaaattttgagcttacataacactggtgctgatctggacctcattctttagccccatcatcactgcagggagaagatatagtaatgatggccagcctggtaaactgctgtcttagctgctaccttttgggaaagtgttagaatatccacatctcttctcattttgtcttctttctaacacaaattcttctctcttctactaccttttgaaaaatagtgtgaggctgggcacggtggctcatgcctgtaatcccagcactttgggaagccgaagtgggtggatcacctgaggtcaggagtttgagactaacctggccaacatggtgaaaccccatctgtactaaaaatacaaaaattagccaggcatggtggcacacacctgtaatcccagctacagcctgagtgacagagtaagactctgtctcaaaaaaaaaagagaaaagaaaagaaaaaatgaaaaaaaaatgtgtgatatatagtctcactagtaaaagtgaaatcagtaagcttctactatggggaatcaaatttcaaaactccccatgagtgataatgtatttcctttcccactcctaccctggccttcaaatttgcatcagataactaaggagtatagtttgtcaattgcattgaaaacatgtgtcacacaaagggaccaacacacactggggcctataggagggtagagggtgggaggaggaagaagatcaggaaaaacaactatgggtactagccttaatacttgggtgacaaagttatctgtacaacaaaccccgacgacacaagtttacctatataacaaacttgcacatgtacccctgaacttaaaaaacgaaagaaaacatgtctcaaagcactactggtaagttaatgcaccatttttttttcctgcacacagactacaaatgtatatagataccacttaatagaagacacagcattgccagaatattttacaagctataagaaatgttaaattgttaaatttgaacttaaaaagggaaaacatggctggtttttttttttcttcaaatgttattaaaacttagtgtgccattcttggtaaacaagaaccagctttaatctgtttattaaattaatgtctttatttttcgcagactttatacattttagttgaagcccttttccagaaaactggaaaaagaccatgtcttcctagctgaataagtcagttcaggactctaggttgatttggccagtttcaaataaatatacttacaaattctctctctctctctctctctctctctctctctctctctctctctggaaaagatgaccctagaacataggttttccctatttaaaaaatcctaatggtctcattaggaagaaccctaaaactccataaagttggcagatattcaaacacttccctctagccagatgatttcggtttgtttattcaagatttcatcattcattgtcaaaatgctagtaactatgtttatgatcctgagatttcctgttcaaggatgcggaatgtcttttcaagtctacttctttgtctctatagtgtttgcttcatagatcttacagatttcttgctaaacttaatcctactacagaaacatttgtcaatgaaattgtgtctgggattggctttaaataggatgggatttggggaggttccaatgaagcaagattgaccaaatgttaatttgtgatgttaggggaagggtcatgtgtctctgtatttttgtgtatgtttgaaaccttttcttattgttttaagtttgaaaagaatgctaataaatccctagagtgagttgcaattgtatttgctgaattaaggttgaagtgtatgttgggagtgtttcgagtacacatagcccagcttggcctgagtgaaaacatgtctccaagacagtgtctttctctttccagggttgttatgatctggtaactagtttcatggagactaacatgggaatcatcgctggagtggcgtttggaatcgcattctcccaggtagcctacataattgtgcagaacctggtctaacctttcctctgcctccctccctggcctccagattctctgcctgccttcctgtgctttgggaaaagctgatagatggggtcaaagctccttgctcattagtcctcaggtgatctgtttattgatttttctttttcaactcaaatgaagttttgtcatcaagggaatatcagttacagttaaactaatgactagctccagaaaaacaactggctacttctgtaggtcaaatggaggttaactgaagaacgtgctggcataattggatcataaacaactcaaaacatcaaatggctgatctggatttgggggaagcttttttcctgattgacctaacccttttttgctctctcttagttcctatgtattacagatgagatctctccctttaaagaaagcctaaatttagcaaacttcaacttgtgatcattattttaatttctaagtttggctattcgtaacaggtttgactattcttatgtggtttcttaagaggaaatcaaattttgtgtattaaattttatatccctttatctgtacctaccctcaaaaaaaacaatgggagaagtactatgccaattaagtaaaccacacacactggaggatagaataagattaagctaaatctaaaatgtagcccacgtccaccaggcagggcatggttccacaggcttctgatctctcagacaaatgatacatccttgctataatgttgctttgggtagaagaatcaacatgtatagttaacaagcaagagcaaactttgtttatgtttaactcagactttgttcagaccaacagatcatgtttcaaacaaagctcgattaatgttgtctgagtaatgtctccacagctctcattttttattatttttttatttctttttatttaggacctggtgtctacaacaaaccacaactctaatttctacataggctatctcagactctaattactttttccctagccatctgtatctctggccctcctgcttagcaatgcagatgcactttaattttattccagtttgttcctaaaactttctaattgaaatgtggaatatacagaaaggtgcataaattatgtttacagcttaataagttaccacaaaatgaacatagctgtgtaaccctcgctaagattaaggaatagaactttagcctgatggtttgttttttactagacagccttagagaagtagaagagcttttcttcttaagcagttacaaaacctgtgagacattttatctcacaagagaacgtgggctcagccaacacaaatatgtttcttgttgcaatttcaaaactatcttttaccatgctttgttattttttgtttttgttttgcagctcatgaagtgaattaaaccctcaaccctccaacacatagacaaaccagagtggggtcacaaacaatgcaaattaactcagtctccagagacatttgaaaagtcattgctactctgaaatttcttctagttgctataatatttcaataataatactcagcaacatcactctaatgactgagggacattttagaggatccccaaaccctggtgactgatgcaaatgtgcaagatgcacttgacagccttgaacatcctgtttacttaacatatgtatgtgtagcatcatattgttaacatcaaaagggcgtcttgtgtttggcatttgaggagacctgtcccattggaggaaaaaaaaatattgctgaagtctcccctaatagctatcctagaaccataaagggagattatgctgatactgtacattaggagaagagagcctcaaagaacctggaatctcatgaatgaaacaccttatcatccaagaatattcccatgtggccatgagcatgagtgtgtgtgtggtattaagaggatcctattttcattaatgagatgaatcaaatcaaatggatccttctccaagtaatgaacctgattaatacctctcttccactcttctctcacacatcccaatgaagaaatgtatgattagacaaataattatctggcctgattaatctctctgtgctaccttaaagaaatctgtgatttgtgaattgttgaatatgcactgtgaccctctaggccagtaagagagcggctttggccttaaggaaccccaactctgaaactctctgcagtgagtttaagtctcatcaaggtgccacatagttgttggggtgataaaacacaaagcccagtggcatcataccatggtgcccatactgctcacccatgtggccaggcaggtccagcagggcagagacttgagacctgctcccaggttcaggcaggaagagaaatggctatggctggcttctgccagccagatgcaccaggaactgcagctatttatggtgctgtcagcctcaggggtcctgaaagctgaagttggcttccagacgtccatagatccagggcatccctgggacaatggtggccacttaccagatgcctgttcacaaagaaccagccctactgattctggtcagtgacctggaaccagacctttggctacatgtgttcagaaattttagagccaatgtcatagtaaaatttagcaaatgttggctgatattgatgaaccagttgtgttggcctatgccttagccttcctataataaagaaggctctactaagttagaggccacagagaggacaaagtaggtaggaaagaacagagctcgctctctctcttcctccctcccacttttgctctcctgccctcgacctttttcttgccctttgctttgcttgctcttgtgacctccgtgctatcatcttttggaagaaactggccatgcacatctattgtctcaaagattaaaggtggtataaagtattaggaaaactaagctgggtctagccttttaatagactgggcaagaactttgtcccctgttagctaacttagctaattgaaagctcctgagtgctgtttttgaacagcagcagggttgtgtcaagcattaaacacttctctctacaaacgtccattacctttgccctctcaaggtaaacctcatttgtctggacttgatgggcagggtctgctgccctataaatttatagcagaaggttgagtgtgtttagtagggtacctcttcgctgcatctttggcaactgctctttcactcgagggcttgtggggagagtgagagatggagcatgcacgcacatcacccctgtcctatccccacccccaaaatggcctggaagacaagagccatgggatgtctgggcatggacatgtttattgttcaatttgtgacattgtgtatatgtacatatgcatgtgtgtctgtggtggggtggtggggtgtcctctgggcttctgtatttagtacttctgtgtctaaatagacccagggctttgctagacttggaacctgttaggctggattaattccccatatcacgtaatattatagtcctgagtaaagacagtagagctgttttccagaaggggagggttgagtgactcgcttgaagttgggcagctactatagatccaggattataattctgacctcttcacctggcttgctgtattaacttttaaggccagagatcacccttgttcctgccactgatagcacctgaagggaattcattttgtgcttttataacaaaaagacttcagtctgtgaaattcaaaaggaaaaggtactcataagaaaacacagaccctattactacccatccattttctaaccctcaccctcctgtctggcctcctccagggtctaaatgctgctaaggtgattcattatgtgctggtcattcttttcttttggggggcccttgagaagacctgtttaccttttctatgtagagggcaggacagagctggggctattcttagataggacaagagggtacaaccttaagctctgagaattacctgtgtagcttggggtgtattctttaacctctcataaccctcagttttcttatctggaaaactgagattgtaatattgtacaggttgtggtaaatattcagtacaggctaggtacagtggctcatgcctgtaatcccagcactttgggaggctgaggcaggcacatcacttgagcccaggagttcaagaccagcccggtcaacatggcaaaaccccatctctactaaaaatacaaaaattagctgaatgtggtggcgcacaaatgtaatcccagctactcaggaggctgaggcaggagaatcacttcaacctggaaggtggaggttgtagtgagccgagattgcaccactgcactccagcctggatattcaatatagtcatcactccgtatctgcaggttctgtatccatggattcaaccaactatggattgaaaataacagtacaacaaaaaataatgcaaataaaagcaatatagtatagcaactatttacacagcatttacattgtattaggtattatgagtaatcttgagatgacttaaaatataaaggaggatgtgcatgggttatatgcaaatattacaccattttgtatcaaggacttgagcatcctaggattttgctatccttgggaagtcctggaaccaatctccaacagatactaagggatgactgtaatctgttctacctgaatgtgttatatacctctgacacttatttgatttttgacattatcaagtgtgttctggtgtttgttggttctggaaaatggaagttctaataaaaaagacaagctataaggttcaaggtcgttacactcatattttagtttctcatttggcagaatattctaaaggttacagccatggtatcttcagccacttggcagtaagtgcatgcgactatgtattttatggcaccaaatgatgttggccagagccttggtaggagatagaacgagtccaataagatgatgatgcctccttacctgaaagcggttatagtttgcatatttcacagcacaattttaatttgaaaaaggaagataagagatgagaactggaacctgcatggataggttaagagccaggagaatggagttcaggtgttgccctgaccaacagtgggacctgaagtggcagcaggtgtttcacctataagataagggtgactaggtggactggatgagcagttccctgccctggaagacttgttaaaacaccagttactgggccccaccccccagcatatctgattcagcaggtctggggcgagatctgagaatgtgcatttctaaaaagatcccaggcgatcgtgatgctcttggtcctggggtcacacttctagtgaaacagtttattcccacctctgatccagtaaaacatgcccagttatctaaggaggagggactacattggccaagagaaagcagcctgtagactcaagtgcacaattgggctcctctctaaagaatgctgatcctccagattcatgaatggaaattttcttttctaatgaacagaacaagatgtgcttaagggtgtcttgagagtatcacagtcatctttattagattcacttgtgccacagtttagatcaaggcacaaagacaagtggaggactagaatcttctgaggaggtggaggtactacatcactggtggtcctgaggcccctaaaaaaactgggaggtgggccctgggtgtagatgagcccacttaggcctaagatatctacatggccgagagacagaatataaagccccactttcccctagcccctcctaccttttcataagccttggctttcttacctcactggtgaatgtgcctgatcaagaatagtgtctctattcttgcctcaaggaaagaactattattttgtcagctgggtatggctgagacatcatagtatgctgagaaatcttccaaatgcatgtgctatagatgtgaattaaattttagccttctagttaatatatcactaaattctgtgttccttaatttttttattactctcataacatgaacaaattttaatactccttaagtgtcaaaagttgttcttaaatggccagagtgagctacagctgcaacatgatggccagtttgagaacttccagttggctctgcagttagactcccaacagctgagatcccatggttgaaatctggttttatcttttgctctagtgccctttccccatttacatacagaaacacttggttgttaaaaaattatgtctagtgatacgcatatgtcaaaaatcacataccccataaatatataaaattattaattaaatattaaaagggtgtggttcggtgacttgagattctcattttcgtttttctccctggcaacagttaattggcatgctgctggcctgctgtctgtcccggttcatcacggccaatcagtatgagatggtgtaaggagaaggtaggtgacagtggggagtgtttaattttgaggggtcccctttgggacacttactacccttcaaatgtgcaggagtactccctggccattgagctacctgatcttggtggcacttgtccatgttcagaaatctcatttctgtggttctgggaaggaagtataattggttcttttgtggaaaatgtggaaatgcttttttcagcttgttatctttcaagtccttattactggtgaatcactcacatgttctcatttctctcttagtctttcaagaatgacggaataagagacctgttttaaaaaggaactgcagcaatctttgaaagacttccaaagaatgttagagcacagtacataatacacttgccctgctccctctcccccttaccccacaacgtgcaactgacactcccacccagtctctgctccacctttcagcccacgtcacgtgtagtgtccattttgtgaagccctgttgtgccacagagtgtagccaggtccccctgcagctagtcctagtgaacctcaccccgaggccctgcatgggccagcccctccatctgtacttggtccaactgcaactcatcatcggtgactggttatcacaccatcgctggcccctttgggccctgcatgtagtgtgggaggctcctgttagctcctcactgtggtaaatgccacacacctttaagtagataagcagacgatagttatctgttcttttgacttaatctcatttggtttgattttccctctactaaggctttcctaccttcttcaggctgcctaagacatgtaacgaaacacttcaataattgtccatgaggagaaaaaaagcatgtgtcatgcatgaaggaaactgaacttgaggtggcctccttgcttgttacatacctgggtatgtgtaggcagtttagtgcatctttgcctctcggttgaaacctgtataaccctgttacaaagctgtgttgttgcttcttgtgaaggccatgatattttgtttttccccaattaattgctattgtgttattttactacttctctctgtattttttcttgcattgacattatagacattgaggacctcatccaaacaatttaaaaatgagtgtgaagggggaacaagtcaaaatatttttaaaagatcttcaaaagtaatgcctctgtctagcatgccaacaagaatgcattgatattgtgaacatttgtgatatatgtattaataaatagagcaattacaa

SEQ ID NO: 413 - DNA, 21876 bp, Homo sapiens
gattcttctatttggccactctgcaagaaggcaatcctctaaggatcaccagcttctacctataagacttcaactcaagatgcaggcaagtaaatgatatgtatataatattagactattccatgcagctccaatgttctaattctactaatcaggaataagaaagttcctaatctttgtagttctactgatccatgggtttccaagctgagaatcaattaatccaggttcctttctcagctttgccactgatttcccagctatggaaaagaggcaagtaactactgaaaaataattatataaagtaagagatatcttattttaattaagaagctcccaatttacatgtagctgacttatatatatgcttcatggaattttggcattctggaaatatctactgtacctaggcacctaggactcaagaacagtcattcttccttccccagagctgcaatatgaataattgggaatttttcttcccaaattccctcctctcccagcttattgaacagatggagattgtattatcttcccctcctctctccacaagtctggcttctctatttatctctggttctgtgtaaactttgcgacatcaagattggctggataaagggactgagatgcgaatggggatgggcaataaccaagccctaggtgctcttgggttcctaccctgctctaccccggctccaggactgcttctctttaggagaacaatgaaggctttaaagaactttcgagggcttgcctgagaaccagtcataaagtgacctttatgaaaaaatagacctaggttgcaaaaattagcttttagaattaacacccccataatatactagtccaatgttcttaggaagagtcatcctaagagaacactggtgctgaacacaggtgattttctacctgagcatacaggtccagtattcaatattctgctttctatgtggtcccagacatggtaatggtcacaagtaaaagatgtagagacttgataatcagtacaagcctcagacaaaaactaattacagccagttcttgcattcatttcttgacctccctttagctacccctttagccatgcatatttacatcttgttcatcaaaaaataattatctgcactaaaatgaactcttatcattgatagtaatagcattacctagatgtacattattttagacaattgctttaaatttaatattctgatttctgaaacacattctgttcaggaaaagaaaaaacaatgtctccaaattcttgatccaatagaaattgcataatcttaaaaggaagagtcctgagagaatagcgtgaggttgagaaaagatctgaagtgacaagataagcaattaatactggaattgctattagtctggtaaccttcagcaagtcagagtctcagtttcctcatcttgtaaagtagaaataatctaactggcatggctgggtaaagtttaagtaggccatcagaaaatactttgtagtccatagagcattaactcatccaggcccctactcaaagtacaaaactgccctttagcatcactgacagcctcttcttgatcacttctagtgatggggaactcatctttggaaggtcatttttgacagccctaatgataagaaagtatatatataaagtgtgtgtgtgtttgtaaaaatacacacatatatttacatatgtacaatgatatacatacatacacatatatgtatataggcatatatatttagccataataaattcctccaacatcagcttcctggttaatcctgatcatcaactccagctcagagcttcattaagggaaggaacaggtcagtgagaatctattctgtaggaacaggaacatgggaacgtttgtcacagagctgatgactgcccttgctgtgttttgttaataactgatttatcttgcttatcatgcctattccaggcaagtagaatgagtttgctttctctgagttccagggaggaggaagccaacacagatgaaagggtccctgtgctgttcaagagggtagcactagccacacagctattccattttaaattaaactaaattaaaattttagttcctcatttcacaggctcaatagccatatgtgattagttattgtgtggcatagttatcaaacatttctattgtagcagaagttgtttgaagagctgtggttgatgattcattaccatctacaatatgccagggaccagttaaactctacatgcaagcactaaaacatcaatagtggaagttttctatcccttgaaaaaattacataatagcatgattaactgagctcttactccggacagttcaagaaaaagggtggcttttattcccaaatgaacatcataggcttcacactctttcccaacaatcttaagaaagtggagatactattaattggttacctatgttgttatcaaatgctcatttccacttacatttggagatctgagcttctctctaaggcagaggtctttaaatcatgaggtgccacacccagatcagaactaaacaaaaattgaaactttaaattggcaaatgtcattgctcatttcttcctaacaagtgaagacctatggttaattcaactgcaggtatggtgaaataactacagttacttagttagacactatttctttcaccacttatctgagcgaagaagtccaggttggatactatatgtagagctttatattaacttttctccaggaataagaaagtgtccacactgccgtttgtcttgaaaacataattagggaaggtgtaccacaaaagaatgggattctctctgagagcatgtttatctactgtcacagctttaattgggaagggtgaaatatctacatctggctaggtctgctcttcaagagctggggccagatatttgccatctctcagccttggtcttttcttctgtaaacagcaggattggagtatatgatcagaaaggtttctgtaattccaatgacttcccaaaataaccatgacctgcatcctatctataaacctcacatagttctctccctaacccatgctgttgtcacaaccctcctacagtcttttttttaggacttagtaaatcgttctgacaaataactgtattctacccataggctttatcttacagtcagcaaatcatttgctaaagtgctaaactgccagagtcataagcccgcattctggaggggcttccagcagtggttggtaaactactgcccaaaggccaaatctgacccacctcctatttctgtacatccaagagctcagaataatatttacatttttaaatggttggaaaaataaaattaagcataatatttcatgtcatatgaaattcaaatttcagtgtctataaataaagttgcattggaacccagcgacatccattcatttatctattgtctatggatacttgtggcctacacagcagagttgagtggtatttggccataccactatgactacatagtctacataccactatgtatgtagactctctcatacagagactgtatggcccacaggcctaaaatatttactacctggccctttacctgcccctgggtgtagagcacagactctagagtcagatggcttggcagcatagctcagctctgttctgttccttccccttcctcaaaactgtataataggaatgacaatagtacctatcccatgggtttttattaagattaagcaaataagtaaaatgcgatgaggatctggcatatttttattattatatatatgtctgatggtattataagttgccacaattttttccagcaaactaaagtattagcagctgaccaatttgttagcaataattgtaagaattgaatttgcaacactccattaaaattcaattctttgtcagatgagtaggtagcgaaaattttctcccattttgtaggttgcctgttcactctgatggtagtttcttttgctgtgcagaagctctttagtttaattagatcccatttgtcaattttgtcttttgttgccattgcttttggtgttttggacatgaagtccttgcccatgcctatgtcctgaatggtaatgcctaggttttcttctagggtttttatggttttaggtctaacgtttaaatctttaatccatcttgaattgatttttgtataaggtgtaaggaagggatccagttttagcttcctacatatggctagcctgttttcccagcaccatttattaaatagggaatcctttccccatttcttctttttgtcaggtttgtcaaagatcagatagttgtaggtatgcggcgttatttctgagggctttgttctgttccattgatctatatctctgttttggtaccagtaccatgctgttttggttactgtagccttgtagtatagtttgagggctaatatccagaatctacagtgaactcaaacaaatttacaagaaaaaaacaaacaaccccatcaaaaagtgggcgaaggacatgaacagacacttctcaaaagaagacatttatgcagccaaaaaacacatgaaaaaatgctcatcatcactggccatcagagaaatgcaaatcaaaaccactatgagataccatctcacaccagttagaatggcaatcattaaaaagtcaggaaacaacaggtgctggagaggatgtggagaaataggaacacttttacactgttggtgggactgtaaactagttcaaccattgtggaagtcagtgtggcgattcctcagggatctagaactagaattaccatttgacccgccatcccattactgggtatatacccaaaggactataaatcatgctgctataaagacacatgcacacgtatgtttattgcggcattattcacaatagcaaagacttggaaccaacccaaatgtccaacaatgatagactggattaagaaaatgtggcacatatacaccatggaatactatgcagccataaaaaatgatgagttcatgtcctttgtagggacatggatgaaattggaaatcatcattctcagtaaactatcgcaagaccaaaaaaccaaacaccgcatattctcactcataggtgggaactgaacgatgagatcacatggacacaggaaggggaatatcacactctagggactgtggtggggtggggggaggggagagggatagcattgggagatatacctaatgctagatgacgagttagtgggtgcagcgcaccagcatggcacatgtatacatatgtaaccaacctgcacaatgttcacatgtaccctaaaacttaaagtgtaattaaaaaaaaaattcaattctttagcagtaaagcagtgggaagatgtctaaggacaactgatatgccaattcgtatagccgtttatccacgaagctaattctgcagtacttaaaaatattttatatgctttatacttctttcaaacttgagtcttgagcttgtactcaacatcgagttcggccctgacatctactctttatagtcggttacctctttctgaagaaacaggcttccaaagagagaccaggggactcattagatgtctcatctaccttgatgattgctaccttgatgattgaaaacagtaacctgcttcctgaatcaaacacaaaacaggcaacatgcagtgtctttgctatgccacaacagggactattagaatttttctcacaattcggactttggttttcaaaagggcttgcgagggaagttacacacaagagaaaaacaatgaaccgaatgaggacaatagcccacgaatttagaatggaggaagcccgtccaccacagcgaaaaagcacagtaccacattggcgggtgctccaatatttgtgaaatgttgatgaccctttaaatgtttctgtgcaacctccacaacaaatactgtgaatcttgcttattaatgcgtttctcaatacgttaaaattcaggaaatcattaagtctagtccttaacagtgaagggcaagcaattttctgtcattgaaattacacaaaacaaaacaaaaagctcacgcctgaattgcttcggactattcaactggaagatagaaaaatatatgaagtaaagaagaataacctacatagaagttcctatctcttatcttcctgaatacttaccagtacactattagtttgttctaaacttttcttatataaaaagtagctgaatacttttagggaaatggattgttttgtctgaatcatccagataattcaaacaattcattttcctaagaacgatatgtgtgagtctgtcctgcccggaaaatgccctctgtcctactcaggacacaagtcacgctcagcttaaacaggcaaggaattgtcccctaggaaggaaatacgccgttgtcgttcagtgaactctgcaaccaacagcaagccaaactctcccttgcacacagttcgtcaagttaattcttattttccaagggcgctttcgtatttccatctttcaaagactccttcacccactggcacctaaggcttgccctaacgcatccagcccctgcctcgcgatggtgcgctccgcttataatagctccgtcctgtccaataaagttgtttaaaataagaaatgtgccagataatagccaagtccgaaggaaaaaaaaaaaaaaagaattcctggggtggtgtattggtgttggaatgtgccattagttttggagggaggaaagtccctggtgtgaattgcctcgcaggtcgtaggccgccactggaccttcagtcgtgcactgcattagcgccgtaatggcaaagatacgaagaagcgcgcaggcaggggagccacggccgcgcgcacaggcaagagctggagacgactgcggagcgcgtcccccacgcccgcgtggtgcgctctggggcggccccctagcggcagggcggggcggggcagggggcggagaggcctggcgcacagggcgagggcggctgcggcgcagtctgcagcatggcgtacccggggcatcctggcgccggcggcgggtactacccaggcggggtaagtgctgactgcgcgggatcgcggcccaggcggctccggggcgctaagaggccaccttggagatgctgcggccagcggggtgaggcgctgctgggcggctacccgggctccttccgccctcggcttctccctgcgctcgcggcctcgccctaggcccctggggttcggcctctccccacgtttccccgtcccttctcctggatggccctgcggggccaaggtgagggtggattgggaccctagaagcccaccctgcggcttctcggatacgcggcgtgaaatcgtgttaattgggtgttggctgacccccaccccaccccacccccgccttcttggttgcctcccagagcaacaacagtcattttattctagaatgatataccttcctccctttaaaaaacaaacaaacaaacaaacaaacaaacaaacaaaaaacgagtgagaagggggacggaaaaaaagggaaaacctgctgaagtaaaagacctgtaggaaggcagcctcgccgggcgtctgggatgcgcgttgtcttgggaactgtttccgagacaggcaatgttccctcgccacccacgagatacagcccggccggacaccttactcttccctaggctacacccgtctcagaatgttaccaactccagccttccatcgttcataaaacgctcttaaaataccataaatgctgtaacaacaaaaggagaatttgaagccctgccattcgttggcttacctagtttgcactcacctcagtaaccttcaggttaatagggattttaaaagttgctttacatatgtagacatcactttcacagcaactctttatggtctaagtcgccagtttttaaattacggggtgtgaatggaagagaggggtggagtgttggcagagtgtgcccggtggtggggaggtgagccttgtgaagggcgggcaggcgggcagttgtctggccttgcacaaaagccctcagtggtgaaagaagaaaacttgattcggcagaatgacgtgtatgtgtttcctgtttcacagtatggaggggctcccggagggcctgcgtttcccggacaaactcaggatccgctgtatggttactttgctgctgtagctggacaggttagcttttccctttaatattaaagagccgttattgtctgcatttgtggtagcttttgatatagtgacacagaaaagcgaacttcctgtggtactgagtccctttgcttctgcaaaagaaaaaaaaagttgtttcttattttagttttttatttctgaatgttcagaataaatgaggacaaagtgttactcgtatttatgtgagttcagttcgaaagcaaacttgtggttgaattaaagggtccaggatggtttcaagcgaaaaaattcaagatctggtaaatataaacgcttgtttgtacaacttaaagacatatattagtaattacatagctcgattctaatgggcactttctttgggttgaacttgattgctaatcattcacccccttaggaaatatggtaaaaacccaccagcttctaaataaggaagttactgttcccttcttagtatcagaaagttaatcttgtgaacagtgtagtttctctttgatgcagatgctgttactaggtcagcccctccatgtccttattaggtgttctggcctgttgacccagagaagcaattaaggtcagctccccaagacctttcacttgtctgcattctgagttgtatgacaggtgctatcttacattgacaggtgctatcttacattgagagaggacacttccctagttcatgaggtcactgtgtgcagtaaatatactgttggtataacccagacacgtccagaggagatgtttgttcttatgaattcaacctagttttgttttgaccaaaagctagaaatagcaaaatcttaatgtgaaaactgtagaatattatgggataaaaaacctaagaccacttttaaggtagtactctaagaaatacagcttaagaaattgaatggaaaatatagtctaaaactggaagaccttccccttaagtatctacttaaactgttaatgatctgtatctttgaaaccacaaggcatggcaaacctcaagactagcattcttagattgccagtgcctccagcatgtaagtgactccacctgcttagctttcagcagccctggcctgtattcagcatacccattgtctttcaaattgctgatcttgctcctcatttataacttataatacccagtgacttgaagatttaggtattttattttaaagtccctaaaaatcacatatatctagttctttcccagttcagccagtgaatgggcactgggaacctaatgtgaatcttccagatgtatttgtgctctgaaaaaaatgattcactatatcataagaaaaagtgaccaaggaggcctttttctgtttgaaccaagccttctatttattgatgtctgctttgtaccttgctctctccacccccatcaaaaaaaaatattttaaaatgtttagctgtagcagtttgctagctcagattgagagaagagtagttgccaagacagactctttctttcatcattaaattacttttggaagtgggttaaggaaaagaatgcccacttttggaaggcattccttttaataaaaaaaaggcattccttttaaataaaaaaaagatactgattttctttgttgttattgcttcattgaatgctgaaggtaaacaacttgaaagtacaaatcactattatgattcctctaattttttttcaaaaggatgggcagatagatgctgatgaattgcagagatgtctgacacagtctggcattgctggaggatacaaacgtaagttgacagtcccaaagtttgtctaaatatactcttgtgtttcctatcttagctgttacttgtgattacagccttcaagaaaactgagcttgtcggatctagcaaagtttagaattccgaaagctaaaatacagtactatttcaaaatgttgatttgaaaacagtttttaaatcactccaggctgggcacagtggctcacacctgtaatcccagtacttcagaggcccaggcaggaggatcgcttgaagccaagagtttttggctgcagtaatctatgattgtaccactgcactccagcctgagcaacagagcaagaccttgtctttaaaataataataataataaattattccatcctacctgccaatctagtggatttctcagatttgggttttgtgtacctagaaccagtgagacagtttgggtggcctccttcacagaggacaaggtagggtgctgaaatggaatctgccaggtcaggggtcattaactgacattaggaactgatatttactgttatttgccaagagcctactctgccctgacctggtggcacttagggctttgagttgctgccctgcacccctggtccctgagtggcctatcctgcactcctggtctctgagctttgggcatgctcctgctaacataagtggttgccatgacatccctcaggtctttcctcttccacttcatagaatgtattcaggctaagtgggaagtggcctttctacttactggacctgctgctccataattcagcccttaccctacccctgccttttgaacactctgccatgagctgagagtaatgaaatactgcaaagatgctccatccctggcagggcacagtggctcacacctgtaatcccagcactttaggagactgaggtgggaggattgcttgagcccgggagttcaagactagcctgggcaacatagtgaaaccttgtctctgcaaaaaatttaaaaattagccaggcatggtggcatgcacctgtggtcccagctactcaggaggctgaggtgggaggattatacaagcccaggaggcggaggttgcagtgagccaagattgtgccactgcactccagcctgggtgacagcctgtctcagaaaatccaaaaaattgctgcatcccaactgggggcttctcatcatccaacacatatgaagtggttcctcttgaaattagatcttgaacatgatagatttccagggtagagaataatgtcttagttcaaatacattaccaacttctttgccagttgttaattgagacaaaacatcaaattgaagacccaatttcatggttagctgtggattaaaatgttcaaactagaattcacagctgtgaatttatagtggcctttttttaaaaactatttgacatggcatgtattagatggctgtctttgaactctttgcatttgttttcattatcctttgttttatgtgactttagtatcctattactctttcctaattagaggaattaatacaaacgaagaacctttcaagttcctgttatttaatctagtcctaaacaaaataagcactttttggattaggggatgttattctttactgtgtaggcagtacatttaaattgttaattgttacgcaattgagctggtaaacaaggtaggcctgcctattagcagggtttatcaaagtgcagtgagatcacagcatggcctgttattctacatcctttcagtagatgaggtgtggcagattttagaatctgactaacaaaatgggttgtatattgttagagagcagtccttttaaaatttcattgagaaagccacatttagtgatggccttagatcaatgcattaaagagaaagcatttcctgaatcatggggcctatgtgattgaatccatttgcctactctctggtggccgtactgaaccacagaaccatcctgcctatgaggtgtcagtgttttgtaatgcagatattatatggccattagtcttttaaacccaacttccaaaccaaaaagcacaggtccgaattggatgagcaggtgggatactccagctcagagcctatgggcccttcttaaccagtttaaaaggaagcagtcatacctagaggtggagttggtgagagaagttgtgttccagtcagtaagattgtaattcagcttctcttttttccctgaatttagttgttcgtctgtgataaggttgagagaaacagctggaggtagggctttccttctaggtccattatattgtatgtttctgtgagaagaaaagatgtttgaggcattctagtagaatgaacagaagagaagaaaaagagtaaaggtaaattacagcagagattctttggaaattattaaaattaacattatttaatttaaataatttcaaaatgttgaattaataattttaattataatttatagttataattatatgtagttacatttacgtaactaatatataatacttataattttaattaattttaaataattatttaaaatagaattaacactaataaaagctatattattaacaaaattgagaaagagttttccttaccaaaacttattggacatcagcgttctagttcattggaactgtctagaatggtgtattttttgttcattcacttttgttcactgccatctcactgccctttcagatccttctcacaaaagatgaccagattcctgatcttcctgatctgtccctctcctcctcagtctttactaacagcttagaaggaattcaaggtcctctgtaatgcaccctcccctgaccaaacatattttctcccactccttttgtactctttgaaagtcatattgagctattcacttacgctttgcctgtcctaggccttctacttctctctttgcttatgctggtccttagctgtcaccaaatgcccccatcattcttgtcattcaaggcttggcttaaattctttgtcttctataaagtctttcttgattctcttactgggaaggagcttctcacttctcaatcccttctggtactttctggcccctccattataattcagcactctaccatgattagggttatatgtgtatgtgacttatcttttccttagactgtcagctaggacggtatgcagtttcacaactgtatctgcaaagttcctgttaccctgagccctgaacataataagtacttaacagtggctgttgagttaatgaatatggaaaattttctgtgtcagaaaaattatagccctgtagccttattggctttttgatttaagattatacattaatttttgagcattagtaaagattagaaaattttattcaaaaaacattccttcttagacgatctaagagggttgtacatataaagtgcagggctctacagcttcctgcgtgggggtgagaatttggtgccatccatccataccagtgcatttttagtgaatacttcctatgagctaggtgctggctctgtagccacaatcaatgcctgggtgttgggaaaagcactgggataagagagaggctgtggaatcacatagaatgggcacataacccagacaggagtcaggaaagttttccttgcagaattgatacctaagctgagcagaaatgaggccgaccatgaagtgagtgggatggggaagttgtgtcctaggttgttagaacagcatgtgcagaagacccagaaatagcgtggttcagtcaagaaattgagaaattctccatgaagatagtgtacggggttgaacaagagtaagagatgagcctgacttgcaaaataagtgtgttaccttatgtaccagttaaggtgcttggactttatcctgagagcagtagatcactgatactgggttttgcataggagagcacatactacccctgactgtaaagactaataaattgggggacatggaagtaaaacaagagtcagggatgcccattagggagctgctggagtcatacaggtgagagaaatgctaactaaggagacagtggggctggaaatggactctacagctgtttagaaggtgattgattattggtggagagggaattgaggaggctcccaggtttctggcttgggttactgctgagtggatgggggtgccattcattaacagagacagagaagctgtctgcctcatagccccttcaataccttcatgtgagcccaacacagttggctctgcgctgtggttgtcaggccgtccagagcagttcttaaactttagcagcattggcatcacctggaaagcttacaaaaaccagattgctgggtcatgccctagagtttctcattcagaggtctggagtgagtcctgagaatttcacctctaacaggtttccatgtgatgctggttcaggttgaaccagcttctttaacatgaatatctatcacctgcacatctgctaaaattcagcttctgattttattggtgtagggtaagggctgagattctgcagttcttcaagctcctgggtgatgctaatatggctggtccaggaatcacactttgagtagaatggtggtctcaaccttggctgctcactagaatcatctgaaaagctttttaaaaatacaaatacctgggtcccacactcagagttcctgatttaattgttctatggtgcagcccaggtatcagaatcttttaaagctttgattcagataagcacaagtgtggagaactacagctccagattagagggacttcatacctccacacaacttaaaagtcagaatgaagaatctaccagctctttcccaaactgtaaaaagtgcttcctcctcctctcacctcagagaatattatctgtggatcaaatggagattgaaggaccaaaatagaaatagtcactagtcttttatttccagtaaagcatatgccaaacacaggaatctattaaatgtgtaaaacctatagtttgcactgttgggagacattacagtaatgagcgcagttgtgttttaatttcagtttggtttgagaaaaaatatgaagctacaaagagctgttaaaaatgttctgtgtgttaacaagcttgcagaatttataccagcttttcccacgtgacccttgtcacttctgccatttagcgttgtagcttctttgtacctatacaatttcttcagtcattgattcccattaattcaatgtaagaggtggtttttaatttcctaatgcttaggttaccagtaaccacacccattgcatgtgctctggtttggttacataagtgaggtaccaaaatgccctcataatactcctaaactgtaggtaaattaaaaaggcttctgaatagtggccaccactgaattggtcatggggtcttatctagagtactcttatttaacacataattctaacaaccatatttatctggtttcatatataagctaagaggtcatagactatttgaggtaggaggttactgctcagtacctgacattgaagggaaaatagaaaaacaagtaatcagacacaaaattagcaaaaccagcaatttatagtcatttatgagtaggaacaaagcaaccctgacttcccacccaccatgttggatataatacattatggttcgttatggtgacttgaactcgctatattacagtttcaaagcaagaaagtatgaacagtactatgtaatacttttttttttttgagatggagtcttgccctgtcacccaggctggagtgcagtggcatgatctcagctcactgtaaccgcctcctcccaggtgcaagcaattctcctgcctcaaccttctgagtagctgagattacaggtgtgtgccaccaggcctggctaatttttatatttttagtagagacgagtttttgccatgttggccaggctggtctcaaactcctgacctcaggtgatccgcctgtctcggcaccccccaaagtgctgggattacaggcgtgagccaccatacccggactatgtaatactttttaaaaggaattctgtcaaagttatttaaatcaaatttgggttcctagcaaaaaatcttctttatggagaaaaggctactttgaagttccatatgattagtcacacgtaaattgatagcatataaaaataaaagtgtataataatcatatttctaattaatttgaatgtatccagtgtaatgtgaatttttggatttgtgttaatatgtatgtacttttcttgatttaacagcttttaacctggagacttgccggcttatggtttcaatgctggatgtatcctttactttgattgttgtctagaataattttttctaaaattctaaaggaattcatcttagaattaatatctagtaaacacaaagtaataaatgatcactaaaaagctttctgaaataattagcttctattatagggtggaatttggtgtgaataaaggaagaaaagaaatttagtaaacagaatgttgttcaggaatttaaggaaacatcagagtattatagaacaagtacagagtccagagtgtcaggacagctttttttctttaacattgattcctctgcaagtgatgggatttttcacatcccacttgttggactgagtttaggtagtgctgactatccagtgcattccatcccacctcatttgtctgggggcactaaacaagggaatattagtaccagagatgatgctaggacagaagggcaaacagcatagcctgaagcacccacaaagtacagcctagttccagtaacaagaccgctttttataagtggttcacaatggcaacgctatttccttataatcaagtcatgtaagttatcttttccccacagtaaaaattggcacttgagctttttctccatagcccctttctatttttaaatcattaattttacatcataccaagaataatctacaataacttttttagccattgaatattgaattccccttatccttgatctttcatttaatccttagaaaatatcgcaaaatacagctctaatccttgattacagttcagagagatatgtctggcacaatgggtttcaatgaatttaaagaactctgggctgtactgaatggctggagacaacactttatcagttttgacactgacaggagtggaacagtagacccacaagaattgcagaaggccctgacaacaatgggtaggtatggcttactagaactctccattcattggtagaagtaagttgatttttatttttaaaaccaggctgggtgcagtggctcacacctgtaatcccagcactttgggaggccaaggagggtggattgcctgagctcgggagttcgagaccagcctgggcaacacagtaaaaccccgactctactaaaatacagaaacattagctgggcgtggtggcatgcacctgcagtcccagctactcgggaggctaagacaggagaatcacttgaacacaggaggcagaggttgctgtgagccgagatcacaccactgcactccagcctgggcgagagtgagactccctctcgtaaataaataaataaataaataattgctacctgaaggcagtttctgttttcttagaaattgtgtgtgttcataattaatatgagtctgcagtcttaaaaaataaaatagtgcttgattattttattttttaatgagcttctgcaatcctttaacctttttactggatggcttttcttttaggatttaggttgagtccccaggctgtgaattcaattgcaaaacgatacagcaccaatggaaagatcaccttcgacgactacatcgcctgctgcgtcaaactgagggctcttacaggtgagttctataaggtcgtgtcatcaccacaagccaagacacagtttttattacatttcatctctcagtgcttctcaacttttattcttcccaaattttttcttgctttagtagtttttttcagattactattaagcatatctggcaaaataattttttggttttttttccagaatttattttagattagtaagtaatctgccattaaaataaacaattaaattttactaaaatgttctaaaacacaatcagctaacttgtgcatttttgatcagataataatgaatttttccccagaatgtgaaatatttggaaagagtgaaattaaaataaaatccttttctatagggcagagctgaaatggtagagaaactgattacagcccatttgttatattggggactctttatctgtttcttaagcagtatctttgttattaagaagctagaaattcggtgcttttatcacaatgaagtaatggccatggaagttgcacagcttttactgactttgggtaaggtattttctccagatctaaaaaaacaaaaaaacaaaaaacacagctggccaacttctgcctgttactttgttgcatattaaatcttttactattcatatagttggcttctttgctttggtcttttgtttatgttaattggttgcacaatttaaatgttactgcaatgtgaattcaatgccaaaataactaacttttatgattttagaaaaaccatttaaagaaaaaccataaattttactgtgttgttttacagacagctttcgaagacgggatactgctcagcaaggtgttgtgaatttcccatatgatgatgtaagtcttagaaattaagagatacagtagatgaaaaggatgtacaccagatgggtatccctttgaaattagctgttaagaatatcttaaggttaaggatgccagagacataagggattcaaaagttagaaagagttatcatccagaatttattaatttcatttattagtcttaactatagtgagaccatgatttgatttgcattcagagacctgggttcaagacccagcttgttgtatttattagctgggtcacttaagcaggtttcttaattgctgtgacactatatgaataaagaagatatagtagtaatgcctttttcactgagccattgtaagatttctattagaaatgcccttgaaaaacactatgcagatatactatctgcttttgtcttctgtaaacaaatcatgtcagtcactgagaatagataacagctcaatagttttgcatacctatgttcttcattgagggcataaggcaggcaacaacttaaatcacaattttttttttttttttgagatggagtctcgctctgttgcccaggttggagtgcagtggcgcaatgtcagctcactgcaacctccacgtctcgggttctagcgattctcctgcctcagcctcctgagggactataggcatgtgccaccatacctggttaagtttttttgtatttttagtagagacggggtttcactgtgttagccaggatggtctcgatctcctgtccttgtgatctgtccgcttaggcctcccaaagtgctgggattacaggcgtgagccactgctcccggctaaatcacaatttaaaacaagttatttactaaacagccaaactaaacaagggtagggtaaggccatgtaatcagtgtgaacataacctagtgccatctttgatggcattagctggatgtatataacaaagctagagagattggttacttgtttcttcagtttttgctcagccattgatttaaaaacaaaaaacaaacaaacaaaaaaacttgtagaattgaaatgactgtaatcactgaatattccattctccattacaaaatataagatgcatgtatttttggtttagcagctgctgcagttataagtacacttttaaaagcttagtatgtgtgtgtgaatatgcttattttacctgcttaagggtgtgttctctttaacatgcgttaacttcttagttgacagtccccttgctgtttctaaagatcagaaggctgcctggggaatggaaagaaagaccatgggctttgacttcagatggggctacttaaaagatttctaaacatcctgatccttattttccttttctctaaaatagggataatcaccttgaccttgcaatagagctgcaagggttagcagtgcacaataccttagtagtgtagggaacactgatagagcagaatctattgctttatgtttagcggggaagccaacatttcacagcaaatactggtatttctaatctcaggtatctgaagggttagctgttctgtttctgtgcatacatacacttgcatgctacaatttgttttaataaagcagattttaaggcaataaactgtttaaggtgttccattagagtaatggggtaatactgtgtggtttggaaatccccacgtaatacaacagtataaactccagttgtttgtgtttgtggtaagtgtctttgaccacggccatttctagtcttggatattatttggaatttaaataattattcaaataattatttaaattatttatccattgaagttatatctgctttctctaagaagttttgatgtgagaaaccctgtggattttatattagactgcttccctaaaaaaaggaaacttttccatctatcatttactcatatcttagaaagttgtaggggttgttttacccgtgttcaaattagaaaaccaaatgtaagctgccagaaataggctgtgccgtataagtgctttgaggtctgtcatataatgctgatttttctttcagttcattcaatgtgtcatgagtgtttaaatcaagaggaagctgcatgaatgtaatcaacattccaactggagctctcctttgcttgtcctctttgccttcggtaatatgtataaacttacatcacgactttctcttaacagctgttgtaaagtttattactttatgtacaactgaagttttgttttagttttgataataaattctttggaactttaataagatctagtctgttacaccatttagaactttcctgagccattatcagtcatgccttattttcttgctaaaactctatgtaaatttaagtatgcaaaatgtttaagtcacattatttatttttcattgtgagacactaaaaactgttaatcagactacagctgttatctttcctctcctacaaagaatactccacacataaaaacttaggtaaatgacatagacgcacttgggtgaaataaaacaacaaaaaaggtaatccagtaatccacgtcaggattcaccttagaagtttagcacacgcccttcaaaacctgttgaataatttgattggcaaatactatctgtcaccaagtccctttttgtcatctatttaaacctttgttaactctccttaaaaatcttgtacattataagcttaactatataaaaagaaaattgatagaaaaagactaagggaatatatggaaatattaacaatgtttattttggatgaatggaattctagatgactttaattttctttatatcagtatttttcagattttctatatgctttccttttaaaatcagattttagtttttaaaatactgatacatccattttgatataccatgtattcacactttaaaaaatacacatagcagagtatcggaaagtatgtaccaaaacattgatctggctaccactgggagtcaggatcatgagttcatcttcttccttcttactgcttttccaaacattctccagtaagcaggtactacatttataatggaaggaattttttaaaaaattttaagctgtacactttcaagtaagatctgaattctaatgctggcttgtgcctcttactatgtggtttggtcattatagataatgcccagtttcagtttccccatctttgaaaaggagataatatgttatctcttgggagtagttctgaatatgaagtgtgttgatacaagaagcactgacaatgtttctgtttcttaaatttaaaactggcctggtttgccttttttatcaagagagcttaacagataaaaaatgaaattagtctattttctacttgccagcagagtatctgtcttattttaggatgcagtgtgaaacttaccattcaactgaacaactagttgtcaactaatgaaaataaaacattttctctaa
